(19) United States
(12) Patent Application Publication
(10) Pub. No.: US 2025/0171802 A1
(43) Pub. Date: May 29, 2025

(54) NUCLEIC ACID COMPOSITIONS FOR DELIVERING EXOGENOUS POLYNUCLEOTIDES AND METHODS OF USE

(71) Applicant: Vyro Bio Inc., Newark, DE (US)

(72) Inventors: Carolini Kaid DAVILA, Osasco, São Paulo (BR); Mauro Ferreira DE AZEVEDO, São Paulo, São Paulo (BR)

(21) Appl. No.: 18/840,022

(22) PCT Filed: Feb. 21, 2023
(86) PCT No.: PCT/US2023/062966

§ 371 Date: Aug. 20, 2024

Related U.S. Application Data
(60) Provisional application No. 63/312,785, filed on Feb. 22, 2022.

(51) Int. Cl. C12N 15/86

(52) U.S. Cl. CPC C12N 15/86; C12N 2770/24071; C12N 2770/24123; C12N 2770/24143

(57) ABSTRACT

Disclosed herein are nucleic acid compositions for delivering exogenous polynucleotides, and methods of use.

### CROSS-REFERENCE TO RELATED APPLICATION(S)

[0001] This application claims the benefit of U.S. Application No. 63/312,785, filed Feb. 22, 2022, the entirety of which is incorporated by reference herein.

### SEQUENCE LISTING

[0002] This application contains a Sequence Listing which has been submitted in XML format and is hereby incorporated by reference in its entirety. The XML copy, created on Feb. 21, 2023, is named 61771-703_601_SL.xml, and is 2,964,424 bytes in size.

### BACKGROUND OF THE INVENTION

[0003] The cellular delivery of various biologically active compounds, such as an antigen and a protein of interest, is of high value both for basic research and industrial applications. However, it is usually compromised by two limitations, one being high toxicity to normal tissues, the other being low delivery efficiency, given that living cells are highly restricted by the complex membrane systems of the cell. Special difficulties have been seen in delivery efforts with the central nervous system (CNS) as a target.

### SUMMARY OF THE INVENTION

[0004] In one aspect, to address the need for a new delivery approach to a target cell, provided herein are recombinant zika viruses and zika-virus-like particles carrying polynucleotides of interest. In some embodiments, the viruses and virus-like particles comprise zika structural proteins. Methods of use involve applying such recombinant zika viruses or such zika-virus-like particles to the target cell. In some cases, such methods of use treat disorders of the central nervous system considering its favorable CNS tropism. In some cases, the viruses and virus-like particles do not comprise replicating zika virus.

[0005] In another aspect, to address the need for a new delivery approach to a target cell, provided herein are transcripts of nucleic acid compositions carrying polynucleotides of interest (e.g., an exogenous polynucleotide) and regulatory regions from a zika genome. Example methods of use involve encapsulating such transcripts with lipid-based reagents and applying such compound to the target cell. In some embodiments, the nucleic acid compositions comprise a zika 5′ UTR, polynucleotide of interest, and a zika 3′ UTR. In some embodiments, the nucleic acid compositions do not encode for a zika structural protein. In some embodiments, the nucleic acid compositions do not encode for a zika non-structural protein. In some embodiments, the polynucleotide of interest has a size of up to about 5700, 5600, 5500, 5400, 5300, 5200, 5100, 5000, 4900, 4800, 4700, 4600, or 4500 nucleotides. In some embodiments, the polynucleotide of interest has a size of about 10, 20, 30, 40, 50, 100, 150, 200, 250, 300, 350, 400, 450, or 500 nucleotides up to about 5700, 5600, 5500, 5400, 5300, 5200, 5100, 5000, 4900, 4800, 4700, 4600, or 4500 nucleotides.

[0006] In some embodiments, a nucleic acid composition comprises (i) a polynucleotide encoding a zika virus capsid protein (C) or the derivative of the zika virus C, a polynucleotide encoding a zika virus viral membrane protein (prM/M) or the derivative of the zika virus prM/M, a polynucleotide encoding a zika virus viral envelope protein (E) or the derivative of the zika virus E, or any combination thereof; and (ii) a polynucleotide exogenous to the zika virus. In some embodiments, the nucleic acid composition comprises the derivative of the zika virus C, where the derivative encodes at least or about 5, 10, 15, 20, 25, or 30 amino acids of C. In some embodiments, the nucleic acid composition comprises the derivative of the zika virus C, where the derivative encodes about 5, 10, 15, 20, or 25 to about 30 amino acids of C. In some embodiments, the nucleic acid composition comprises a polynucleotide encoding C. In some embodiments, the nucleic acid composition does not encode a polynucleotide encoding a zika virus viral membrane protein (prM/M) or the derivative of the zika virus prM/M, and a polynucleotide encoding a zika virus viral envelope protein (E) or the derivative of the zika virus E. In some embodiments, the exogenous polynucleotide has a size of up to about 5700, 5600, 5500, 5400, 5300, 5200, 5100, 5000, 4900, 4800, 4700, 4600, or 4500 nucleotides. In some embodiments, the exogenous polynucleotide has a size of about 10, 20, 30, 40, 50, 100, 150, 200, 250, 300, 350, 400, 450, or 500 nucleotides up to about 5700, 5600, 5500, 5400, 5300, 5200, 5100, 5000, 4900, 4800, 4700, 4600, or 4500 nucleotides. In some embodiments, the nucleic acid composition is a delivery vector for delivering the exogenous polynucleotide to a target cell in a subject. The target cell may be a cell in the central nervous system.

[0007] In some embodiments, the nucleic acid composition comprises the polynucleotide encoding the zika virus C or the derivative of the zika virus C, the polynucleotide encoding the zika virus prM/M or the derivative of the zika virus prM/M, and the polynucleotide encoding the zika virus E or the derivative of the zika virus E. In some embodiments, the polynucleotide encoding the zika virus C or the derivative of the zika virus C, the polynucleotide encoding the zika virus prM/M or the derivative of the zika virus prM/M, and the polynucleotide encoding the zika virus E or the derivative of the zika virus E are expressed on one or more separate nucleic acids.

[0008] In some embodiments, the polynucleotide encoding the derivative of the zika virus C comprises at least one substitution, at least one deletion, and/or at least one insertion as compared to a wild-type zika virus C. In some embodiments, the zika virus C or the derivative of the zika virus C comprises an amino acid sequence at least 90%, 91%, 92%, 93%, 94%, 95%, 96%, 97%, 98%, 99%, or 100% identical to a sequence of Table 1A, Table 1D, Table 1I, Table 2, or Table 3. In some embodiments, the derivative of the zika virus C comprises about 5, 10, 15, 20, or 25 to about 30 amino acids of a sequence of Table 1A, Table 1D, Table 1I, Table 2, or Table 3.

[0009] In some embodiments, the polynucleotide encoding the derivative of the zika virus prM/M comprises at least one substitution, at least one deletion, and/or at least one insertion as compared to a wild-type zika virus prM/M. In some embodiments, the zika virus prM/M or the derivative of the zika virus prM/M comprises a sequence at least 90%, 91%, 92%, 93%, 94%, 95%, 96%, 97%, 98%, 99%, or 100% identical to a sequence of Table 1A, Table 1F, or Table 1K.

[0010] In some embodiments, the polynucleotide encoding the derivative of the zika virus E comprises at least one substitution, at least one deletion, and/or at least one insertion as compared to a wild-type zika virus E. In some embodiments, the polynucleotide encoding E is translated into a wild zika virus type E. In some embodiments, the zika virus E or the derivative of the zika virus E comprises a sequence at least 90%, 91%, 92%, 93%, 94%, 95%, 96%, 97%, 98%, 99%, or 100% identical to sequence of Table 1A, Table IE, or Table 1J.

[0011] In some embodiments, the nucleic acid composition comprises a 5′ untranslated region (5′ UTR) of the zika virus. In some embodiments, the zika virus 5′UTR, or the derivative of the zika virus 5′UTR comprises a sequence at least 80%, 81%, 82%, 83%, 84%, 85%, 86%, 87%, 88%, 89%, 90%, 91%, 92%, 93%, 94%, 95%, 96%, 97%, 98%, 99%, or 100% identical to sequence of Table 1A, Table 1C, Table 1H, or Table 2.

[0012] In some embodiments, the nucleic acid composition comprises a 3′ untranslated region (3′ UTR) of the zika virus. In some embodiments, the zika virus 3′UTR, or the derivative of the zika virus 3′UTR comprises a sequence at least 80%, 81%, 82%, 83%, 84%, 85%, 86%, 87%, 88%, 89%, 90%, 91%, 92%, 93%, 94%, 95%, 96%, 97%, 98%, 99%, or 100% identical to sequence of Table 1A, Table 1B, Table 1G, or Table 2.

[0013] In some embodiments, the nucleic acid composition does not comprise a polynucleotide encoding one or more non-structural (NS) proteins selected from (i) a NS1, (ii) a NS2A, (iii) a NS2B, (iv) a NS3, (v) a NS4A, (vi) a NS4B, (vii) a NS5, or (viii) two or more of (i)-(vii). In other embodiments, the nucleic acid composition comprises polynucleotide encoding one or more non-structural (NS) proteins selected from (i) a NS1, (ii) a NS2A, (iii) a NS2B, (iv) a NS3, (v) a NS4A, (vi) a NS4B, (vii) a NS5, or (viii) two or more of (i)-(vii). In some embodiments, the NS1 is a zika virus NS1, the NS2A is a zika virus NS2A, the NS2B is a zika virus NS2B, the NS3 is a zika virus NS3, the NS4A is a zika virus NS4A, the NS4B is a zika virus NS4B, or the NS5 is a zika virus NS5, or any combination of two or more thereof.

[0014] In some embodiments, the components of the nucleic acid composition comprise African zika virus components, Asian zika virus components, or Brazilian zika virus components, or a combination thereof. In one specific embodiment, the zika virus is African MR766 strain.

[0015] In some embodiments, the exogenous polynucleotide is an antigen or an antigenic epitope thereof. In some embodiments, the antigen or an antigenic epitope thereof is disease-associated. In specific embodiments, the antigen or an antigenic epitope thereof is from a pathogen.

[0016] In some embodiments, the pathogen is a virus. In specific embodiments, the virus is a human SARS coronavirus, an influenza A virus, an influenza B virus, an influenza C virus, an ebolavirus, a hepatitis B virus, a hepatitis C virus, a herpes simplex virus, a human immunodeficiency virus (HIV), a human papillomavirus (HPV-6, HPV-11), a measles virus, a rabies virus, a poliovirus, or a yellow fever virus.

[0017] In some embodiments, the pathogen is a bacterium. In specific embodiments, the bacterium is Acinetobacter baumanii, Aggregatobacter actinomycetemcomitans, Bartonella bacilliformis, Bartonella. henselae, Bartonella quintana, Bifidobacterium Borrelia, Bortadella pertussis, Brucella sp, Burkholderia cepacis, Burkholderia psedomallei, Campylobacter jejuni, Cardiobacterium hominis, Campylobacter fetus, Chlamydia pneumonia, Chlymydia trahomatis, Clostridium difficile, Cyanobacteria, Eikennella corrodens, Enterobacter, Enterococcus faccium, Escherichia coli, Escherichia coli 0157, Franceilla tularensis, Fusobacterium nucleatum, Haemophilus influenza, Haemophilus aphrophilus, Haemophilus ducreyi, Haemophilus parainfluenzae, Helicobacter pylori, Kingella kingae, Klebsiella pneumonia, Legionella bacteria, Legionella pneumophila serogroup 1, Leptospria, Morganella morganii, Neisseria gonorrhoeae, Neisseria meningitidis, Proteus mirabilis, Proteus vulgaris, Proteus myxofaciens, Providencia rettgeri, Providencia alcalifaciens, Providencia stuartii, Pseudomonas aeruginosa, Pseudomonas paucimobilis, Pseudomonas putida, Pseudomonas fluorescens, Pseudomonas acidovorans, Rickettsiae, Salmonella enterica, Salmonella typhi, Salmonella paratyphi types A, B typhus, Salmonella. dublin, Salmonella arizonae, Salmonella choleraesuis, Serratia marcescens, Schigella dysenteriae, Schigella flexneri, Schigella boydii, Schigella sonnei, Treponema, Stenotrophomonas maltophilia, Vibrio cholerae, Vibrio mimicus, Vibrio alginolyticus, Vibrio hollisae, Vibrio parahaemolyticus, Vibrio vulnificus, Yersinia pestitis, Actinomycetes, Bacillus anthracis, Bacillus subtilis, Clostridium tetani, Clostridium. perfingens, Clostridium botulinum, Clostridium tetani. Corynebacterium diphtheriae, Enterococcus faecalis, Enterococcus faecium, Erysipelothrix ruhsiopathiae, Listeria monocytogenes, Mycobacterium leprae, Mycobacterium tuberculosis, Mycoplasma, Nocardia, Propionibacerium, Pseudomonas aeruginosa, Pneumococci, Staphylococcus aureus, Staphylococcus epidermidis, methicillin resistant Staphylococcus aureus (MRSA), vancomycin resistant Staphylococcus aureus (VRSA), Staphylococcus lugdunensis, Staphylococcus saprophyticus, Streptococcus pneumonia, Streptococcus pyogenes, or Streptococcus mutants.

[0018] In some embodiments, the pathogen is a fungus, an amoeba, or a parasite. In specific embodiments, the fungus, the amoeba, or the parasite is Acanthamoeba spp, American tryppanosomiasis, Balamuthia mandnillanis, Babesia divergenes, Babesia bigemina, Babesia equi, Babesia microfti, Babesia duncani, Balantidium coli, Blastocystis spp Cryptosporidium spp, Cyclospora cayetanensis, dientamoeba fragilis, Diphyllobothrium latum, Leishmania amazonesis, Naegleria fowderi, Plasmodium falciparum, Plasmodium vivax, Plasmodium ovale curtisi, Plasmodium malariae, Rhinosporidium seeberi, Sarcocystis bovihominis, Sarcocystiss suihominis, Toxoplasma gondii, Trichmonas vaginalis, Trypanosoma brucei, Trypanosoma cruzi, and Taenia multiceps.

[0019] In some embodiments, the exogeneous polynucleotide encodes a gene editing tool. In specific embodiments, the gene editing tool is selected from a group consisting of meganuclease associated agents, CRISPR associated agents, TALEN associated agents, and zinc finger associated agents.

[0020] In some embodiments, the exogeneous polynucleotide is a small interfering RNA (siRNA), antisense RNA, micro RNA (miRNA), small or short hairpin RNA (shRNA), guide RNA (gRNA), clustered regularly interspaced short palindromic repeat RNA (crRNA), trans-activating clustered regularly interspaced short palindromic repeat RNA (tracrRNA), immune-stimulating oligonucleotide, antisense nucleic acid, or ribozyme. In specific embodiments, the exogeneous polynucleotide targets beta-secretase 1 (BACE1) and/or amyloid precursor protein (APP).

[0021] In some embodiments, the exogeneous polynucleotide encodes a polypeptide associated with a genetic disorder. In specific embodiments, the polypeptide is brain-derived neurotrophin factor (BDNF), nerve growth factor (NGF), Neprilysin inhibitors (NEP), endothelin converting enzyme (ECE), cathepsin B (CTSB), apolipoprotein E 2 (APOE2), SH3 and multiple ankyrin repeat domains protein (SHANK), neurturin (NRTN), glial cell-derived neurotrophic factor (GDNF), cerebral dopamine neurotrophic factor (CDNF), vascular endothelial growth factor A (VEGF-A), or aromatic L-amino acid decarboxylase (AADC).

[0022] In some embodiments, the exogeneous polynucleotide encodes a therapeutic agent or a diagnostic agent. In specific embodiments, the therapeutic agent is an antibody-based therapeutic agent, a hormone, a cytokine, an inhibitor or antagonist of an immune checkpoint regulator, an immune stimulatory molecule, or an agonist of an immune co-stimulatory molecule. In further embodiments, the inhibitor or antagonist of an immune checkpoint regulator is an anti-PD1 antibody. In another embodiments, the antibody-based therapeutic agent is an antibody, a functional fragment of an antibody, a chimeric antigen receptor (CAR), or a T cell receptor (TCR). In still other embodiments, the cytokine comprises lymphokine, monokine, polypeptide hormone, growth hormone, parathyroid hormone, thyroxine, insulin, proinsulin, relaxin, prorelaxin, glycoprotein hormone, follicle stimulating hormone (FSH), thyroid stimulating hormone (TSH), luteinizing hormone (LH), hepatic growth factor, fibroblast growth factor, prolactin, placental lactogen, tumor necrosis factor-a and -β, mullerian-inhibiting substance, mouse gonadotropin-associated peptide, inhibin, activin, vascular endothelial growth factor, integrin, thrombopoietin (TPO), nerve growth factor, NGF-β, platelet growth factor, transforming growth factor (TGF), TGF-a, TGF-β, insulin-like growth factor-I and -II, erythropoietin (EPO), osteoinductive factor, interferon, such as interferon-a, -β and -γ, colony stimulating factor (CSF), macrophage-CSF (M-CSF), granulocyte-macrophage-CSF (GM-CSF), granulocyte-CSF (GCSF), interleukin (IL), tumor necrosis factor, TNF-a, TNF-β, LIF, or kit ligand (KL), or a combination of two or more thereof.

[0023] In some embodiments, the exogeneous polynucleotide is about or up to about 10000, 9000, 8000, 7000, 6000, or 5000 nucleotides long. For example, the exogenous polynucleotide is about 50 to about 10000, 9000, 8000, 7000, 6000, or 5000 nucleotides long.

[0024] In some embodiments, components of the nucleic acid composition described herein are expressed on one nucleic acid or two or more separate nucleic acids. In some embodiments, the nucleic acid composition further comprises one or more expression control elements in operable linkage that confers expression of the nucleic acid composition in vitro or in vivo. In some embodiments, the expression control element is a promoter that drives expression of the nucleic acid complex in vitro. In specific embodiments, the promoter is T7, T3, SP6 or any phage promoter.

[0025] In some embodiments, the expression control element is a promoter that drives expression of the nucleic acid complex in a target cell. In some specific embodiments, the promoter is CMV, SV40 or any eukaryotic promoter. In some embodiments, the target cell is a neuron, or a non-neuron cell, VERO, COS, CHO, C6/36, HeLa, HEK, HepG2. In some embodiments, the target cell is an oligodendrocyte, microglia, or astrocyte.

[0026] In another aspect, provided herein is a pharmaceutical composition comprising the nucleic acid composition described herein with a pharmaceutically acceptable salt or derivative thereof.

[0027] In another aspect, provided herein is a recombinant zika virus or a zika-virus-like particle that is generated from expressing the nucleic acid composition described herein in a producer cell, wherein the producer cell is further infected by a second zika virus, so that the zika virus C or the derivative of the zika virus C, the zika virus prM/M or the derivative of the zika virus prM/M, and the zika virus E or the derivative of the zika virus E are present in the recombinant zika virus.

[0028] In some embodiments, the second zika virus is a wild-type zika virus. In some embodiments, the wild-type zika virus is an African, an Asian and a Brazilian strain. In other embodiments, the second zika virus is a modified zika virus. In some specific embodiments, the modified zika virus comprises one or more microRNA-based gene-silencing machineries. In some specific embodiments, the one or more microRNA-based gene-silencing machineries control viral replication.

[0029] In another aspect, provided herein is a recombinant zika virus or a zika-virus-like particle that is generated from expressing the nucleic acid composition as described herein in a producer cell, without an infection of a second zika virus, wherein the zika virus C or the derivative of the zika virus C, the zika virus prM/M or the derivative of the zika virus prM/M, and the zika virus E or the derivative of the zika virus E are present in the recombinant zika virus or the zika-virus-like particle.

[0030] In some embodiment, the producer cell is a Vero E6, HEK, HEK 293T, HEK 293TT, FreeStyle™ 293-F Cell, HEK-293.2sus or C6/36 cell.

[0031] In some embodiments, the recombinant zika virus is replication competent. In other embodiments, the recombinant zika virus is replication incompetent without lowering the vector titer or impairing expression of the exogeneous polynucleotide. In some embodiments, the recombinant zika virus has decreased insertional mutagenesis. In other embodiments, the recombinant zika virus has decreased immune response.

[0032] In another aspect, provided herein is a pharmaceutical composition comprising the recombinant zika virus or the zika-virus-like particle described herein with a pharmaceutically acceptable salt or derivative thereof.

[0033] In another aspect, provided herein is a method of delivering an exogeneous polynucleotide to a target cell, the method comprising administering to the target cell the recombinant zika virus or the zika-virus-like particle described herein comprising the exogeneous polynucleotide.

[0034] In some embodiments, the target cell is a neuron or a non-neuron cell. In specific embodiments, the neuron is an oligodendrocyte, microglia, or astrocyte. In another specific embodiments, the non-neuron cell is a prostate epithelial cell, a urethra epithelial cell, a Sertoli cell, a Leydig cell, a spermatogonium cell or a retinal cell.

[0035] In some embodiments, the method is carried out in vitro, ex vivo, or in vivo.

[0036] In some embodiments, the target cell transiently expresses the exogeneous polynucleotide after delivery. In other embodiments, the target cell persistently expresses the exogeneous polynucleotide after delivery.

[0037] In another aspect, provided herein is a method of treating Alzheimer's disease in a subject in need thereof, and the method comprises administering to the subject an effective amount of the recombinant zika virus or the zika-virus-like particle as described herein comprising a polynucleotide encoding a brain-derived neurotrophin factor (BDNF).

[0038] In another aspect, provided herein is a method of treating autism in a subject in need thereof, and the method comprises administering to the subject an effective amount of the recombinant zika virus or the zika-virus-like particle as described herein comprising a polynucleotide encoding SH3 and multiple ankyrin repeat domains protein (SHANK).

[0039] In yet another aspect, provided herein is a method of treating Parkinson's disease in a subject in need thereof, the method comprising administering the subject an effective amount of the recombinant zika virus or the zika-virus-like particle as described herein comprising a polynucleotide encoding aromatic L-amino acid decarboxylase (AADC).

[0040] In some embodiments, the administrating is via systemic delivery.

[0041] In some embodiments, the administrating is performed intravenously and/or intratumorally.

[0042] In some embodiments, the administrating targets the cerebral spinal fluid in intracerebroventricular, cisterna magna, subpial, and/or intrathecal. In other embodiments, the administrating is not performed intraparenchymal.

[0043] In some embodiments, a nucleic acid composition comprises (i) a polynucleotide encoding a ribozyme (ii) 5′untranslated region (UTR) of a zika virus; (iii) 3′UTR of the zika virus; and (iv) a polynucleotide exogenous to the zika virus. In some embodiments, the ribozyme is a hammerhead ribozyme or a hepatitis delta virus (HDV) ribozyme. In some embodiments, the nucleic acid further comprises a polynucleotide encoding a second ribozyme. In some specific embodiments, the second ribozyme is a hammerhead ribozyme or a hepatitis delta virus (HDV) ribozyme. In some embodiments, the polynucleotide encoding the ribozyme encodes a hammerhead ribozyme and the polynucleotide encoding the second ribozyme encodes an HDV ribozyme. In some embodiments, the nucleic acid composition further comprises a C-partial. A C-partial may refer to a polynucleotide that encodes for a portion of C, e.g., about 5, 10, 15, 20, or 25 amino acids to about 30 amino acids of C. In some embodiments, the exogenous polynucleotide has a size of up to about 5700, 5600, 5500, 5400, 5300, 5200, 5100, 5000, 4900, 4800, 4700, 4600, or 4500 nucleotides. In some embodiments, the exogenous polynucleotide has a size of about 10, 20, 30, 40, 50, 100, 150, 200, 250, 300, 350, 400, 450, or 500 nucleotides up to about 5700, 5600, 5500, 5400, 5300, 5200, 5100, 5000, 4900, 4800, 4700, 4600, or 4500 nucleotides. In some embodiments, the nucleic acid composition is a delivery vector for delivering the exogenous polynucleotide to a target cell in a subject. The target cell may be a cell in the central nervous system.

[0044] In some embodiments, the zika virus is an African zika virus, an Asian zika virus, a Brazilian zika virus component, or a combination of one or two thereof. In specific embodiments, the zika virus is African MR766 strain.

[0045] In some embodiments, the exogeneous polynucleotide is an antigen or an antigenic epitope thereof. In some embodiments, the antigen or an antigenic epitope thereof is disease associated. In specific embodiments, the antigen or an antigenic epitope thereof is from a pathogen.

[0046] In some embodiments, the pathogen is a virus. In specific embodiments, the virus is a human SARS coronavirus, an influenza A virus, an influenza B virus, an influenza C virus an ebolavirus, a hepatitis B virus, a hepatitis C virus, a herpes simplex virus, a human immunodeficiency virus (HIV), a human papillomavirus (HPV-6, HPV-11), a measles virus, a rabies virus, a poliovirus, or a yellow fever virus.

[0047] In some embodiments, the pathogen is a bacterium. In specific embodiments, the bacterium is Acinetobacter baumanii, Aggregatobacter actinomycetemcomitans, Bartonella bacilliformis, Bartonella. henselae, Bartonella quintana, Bifidobacterium Borrelia, Bortadella pertussis, Brucella sp, Burkholderia cepacis, Burkholderia psedomallei, Campylobacter jejuni, Cardiobacterium hominis, Campylobacter fetus, Chlamydia pneumonia, Chlymydia trahomatis, Clostridium difficile, Cyanobacteria, Eikennella corrodens, Enterobacter, Enterococcus faccium, Escherichia coli, Escherichia coli 0157, Franceilla tularensis, Fusobacterium nucleatum, Haemophilus influenza, Haemophilus aphrophilus, Haemophilus ducreyi, Haemophilus parainfluenzae, Helicobacter pylori, Kingella kingae, Klebsiella pneumonia, Legionella bacteria, Legionella pneumophila serogroup 1, Leptospria, Morganella morganii, Neisseria gonorrhoeae, Neisseria meningitidis, Proteus mirabilis, Proteus vulgaris, Proteus myxofaciens, Providencia rettgeri, Providencia alcalifaciens, Providencia stuartii, Pseudomonas aeruginosa, Pseudomonas paucimobilis, Pseudomonas putida, Pseudomonas fluorescens, Pseudomonas acidovorans, Rickettsiae, Salmonella enterica, Salmonella typhi, Salmonella paratyphi types A, B typhus, Salmonella. dublin, Salmonella arizonae, Salmonella choleraesuis, Serratia marcescens, Schigella dysenteriae, Schigella flexneri, Schigella boydii, Schigella sonnei, Treponema, Stenotrophomonas maltophilia, Vibrio cholerae, Vibrio mimicus, Vibrio alginolyticus, Vibrio hollisae, Vibrio parahaemolyticus, Vibrio vulnificus, Yersinia pestitis, Actinomycetes, Bacillus anthracis, Bacillus subtilis, Clostridium tetani, Clostridium. perfingens, Clostridium botulinum, Clostridium tetani. Corynebacterium diphtheriae, Enterococcus faecalis, Enterococcus faecium, Erysipelothrix ruhsiopathiae, Listeria monocytogenes, Mycobacterium leprae, Mycobacterium tuberculosis, Mycoplasma, Nocardia, Propionibacerium, Pseudomonas aeruginosa, Pneumococci, Staphylococcus aureus, Staphylococcus epidermidis, methicillin resistant Staphylococcus aureus (MRSA), vancomycin resistant Staphylococcus aureus (VRSA), Staphylococcus lugdunensis, Staphylococcus saprophyticus, Streptococcus pneumonia, Streptococcus pyogenes, or Streptococcus mutants.

[0048] In some embodiments, the pathogen is a fungus, an amoeba, or a parasite. In specific embodiments, the fungus, the amoeba, or the parasite is Acanthamoeba spp, American tryppanosomiasis, Balamuthia mandnillanis, Babesia divergenes, Babesia bigemina, Babesia equi, Babesia microfti, Babesia duncani, Balantidium coli, Blastocystis spp Cryptosporidium spp, Cyclospora cayetanensis, dientamoeba fragilis, Diphyllobothrium latum, Leishmania amazonesis, Naegleria fowderi, Plasmodium falciparum, Plasmodium vivax, Plasmodium ovale curtisi, Plasmodium malariae, Rhinosporidium seeberi, Sarcocystis bovihominis, Sarcocystiss suihominis, Toxoplasma gondii, Trichmonas vaginalis, Trypanosoma brucei, Trypanosoma cruzi, and Taenia multiceps.

[0049] In some embodiments, the exogeneous polynucleotide encodes a gene editing tool. In specific embodiments, the gene editing tool is selected from a group consisting of meganuclease associated agents, CRISPR associated agents, TALEN associated agents, and zinc finger associated agents.

[0050] In some embodiments, the exogeneous polynucleotide is a small interfering RNA (siRNA), antisense RNA, micro RNA (miRNA), small or short hairpin RNA (shRNA), guide RNA (gRNA), clustered regularly interspaced short palindromic repeat RNA (crRNA), trans-activating clustered regularly interspaced short palindromic repeat RNA (tracrRNA), immune-stimulating oligonucleotide, antisense nucleic acid, or ribozyme. In specific embodiments, the exogeneous polynucleotide targets beta-secretase 1 (BACE1) and/or amyloid precursor protein (APP).

[0051] In some embodiments, the exogeneous polynucleotide encodes a polypeptide associated with a genetic disorder. In specific embodiments, the polypeptide is brain-derived neurotrophin factor (BDNF), nerve growth factor (NGF), Neprilysin inhibitors (NEP), endothelin converting enzyme (ECE), cathepsin B (CTSB), apolipoprotein E 2 (APOE2), SH3 and multiple ankyrin repeat domains protein (SHANK), neurturin (NRTN), glial cell-derived neurotrophic factor (GDNF), cerebral dopamine neurotrophic factor (CDNF), vascular endothelial growth factor A (VEGF-A), or aromatic L-amino acid decarboxylase (AADC).

[0052] In some embodiments, the exogeneous polynucleotide encodes a therapeutic agent or a diagnostic agent. In specific embodiments, the therapeutic agent is an antibody-based therapeutic agent, a hormone, a cytokine, an inhibitor or antagonist of an immune checkpoint regulator, an immune stimulatory molecule, or an agonist of an immune co-stimulatory molecule. In further embodiments, the inhibitor or antagonist of an immune checkpoint regulator is an anti-PD1 antibody. In other embodiments, the antibody-based therapeutic agent is an antibody, a functional fragment of an antibody, a chimeric antigen receptor (CAR), or a T cell receptor (TCR). In still other embodiments, the cytokine comprises lymphokine, monokine, polypeptide hormone, growth hormone, parathyroid hormone, thyroxine, insulin, proinsulin, relaxin, prorelaxin, glycoprotein hormone, follicle stimulating hormone (FSH), thyroid stimulating hormone (TSH), luteinizing hormone (LH), hepatic growth factor, fibroblast growth factor, prolactin, placental lactogen, tumor necrosis factor-a and -β, mullerian-inhibiting substance, mouse gonadotropin-associated peptide, inhibin, activin, vascular endothelial growth factor, integrin, thrombopoietin (TPO), nerve growth factor, NGF-β, platelet growth factor, transforming growth factor (TGF), TGF-a, TGF-β, insulin-like growth factor-I and -II, erythropoietin (EPO), osteoinductive factor, interferon, such as interferon-a, -β and -γ, colony stimulating factor (CSF), macrophage-CSF (M-CSF), granulocyte-macrophage-CSF (GM-CSF), granulocyte-CSF (GCSF), interleukin (IL), tumor necrosis factor, TNF-a, TNF-β, LIF, or kit ligand (KL), or a combination of two or more thereof.

[0053] In some embodiments, the exogeneous polynucleotide is about or up to about 10000, 9000, 8000, 7000, 6000, or 5000 nucleotides long. For example, the exogenous polynucleotide is about 50 to about 10000, 9000, 8000, 7000, 6000, or 5000 nucleotides long.

[0054] In some embodiments, the nucleic acid composition further comprises one or more expression control elements in operable linkage that confers expression of the nucleic acid composition in vitro. In some embodiments, the expression control element is a promoter that drives expression of the nucleic acid complex in vitro. In specific embodiments, the promoter is T7, T3, SP6 or any phage promoter.

[0055] In another aspect, provided herein is a pharmaceutical composition comprising the nucleic acid composition described herein with a pharmaceutically acceptable salt or derivative thereof.

[0056] In another aspect, provided herein is method of delivering an exogeneous polynucleotide to a target cell, the method comprising applying to the target cell a compound produced from the nucleic acid composition as described herein comprising the exogeneous polynucleotide.

[0057] In some embodiments, the compound is produced by encapsulating a transcript produced from the nucleic acid composition described herein with a lipid-based agent. In specific embodiments, the transcript is capless. In another specific embodiments, the transcript is produced by in vitro transcribing the nucleic acid composition.

[0058] In some embodiments, the lipid-based agent is a lipofectamine-related reagent, a liposome, or a lipid nanoparticle.

[0059] In another aspect, provided herein is a method of triggering or boosting an immune response in a subject, the method comprising administering to the subject an effective amount of a compound produced from the nucleic acid composition as described herein comprising an antigen or an antigenic epitope thereof.

[0060] In some embodiments, the compound is produced by encapsulating a transcript produced from the nucleic acid composition described herein with a lipid-based agent. In specific embodiments, the transcript is capless. In another specific embodiments, the transcript is produced by in vitro transcribing the nucleic acid composition.

[0061] In some embodiments, the lipid-based agent is a lipofectamine-related reagent, a liposome, or a lipid nanoparticle.

[0062] In some embodiments, the administrating is performed intramuscularly.

[0063] In some embodiments, the antigen or an antigenic epitope thereof is from a pathogen.

[0064] In some embodiments, the pathogen is a virus. In specific embodiments, the virus is a human SARS coronavirus, an influenza A virus, an influenza B virus, an influenza C virus an ebolavirus, a hepatitis B virus, a hepatitis C virus, a herpes simplex virus, a human immunodeficiency virus (HIV), a human papillomavirus (HPV-6, HPV-11), a measles virus, a rabies virus, a poliovirus, or a yellow fever virus.

[0065] In some embodiments, the pathogen is a bacterium. In specific embodiments, the bacterium is Acinetobacter baumanii, Aggregatobacter actinomycetemcomitans, Bartonella bacilliformis, Bartonella. henselae, Bartonella quintana, Bifidobacterium Borrelia, Bortadella pertussis, Brucella sp, Burkholderia cepacis, Burkholderia psedomallei, Campylobacter jejuni, Cardiobacterium hominis, Campylobacter fetus, Chlamydia pneumonia, Chlymydia trahomatis, Clostridium difficile, Cyanobacteria, Eikennella corrodens, Enterobacter, Enterococcus faccium, Escherichia coli, Escherichia coli 0157, Franceilla tularensis, Fusobacterium nucleatum, Haemophilus influenza, Haemophilus aphrophilus, Haemophilus ducreyi, Haemophilus parainfluenzae, Helicobacter pylori, Kingella kingae, Klebsiella pneumonia, Legionella bacteria, Legionella pneumophila serogroup 1, Leptospria, Morganella morganii, Neisseria gonorrhoeae, Neisseria meningitidis, Proteus mirabilis, Proteus vulgaris, Proteus myxofaciens, Providencia rettgeri, Providencia alcalifaciens, Providencia stuartii, Pseudomonas aeruginosa, Pseudomonas paucimobilis, Pseudomonas putida, Pseudomonas fluorescens, Pseudomonas acidovorans, Rickettsiae, Salmonella enterica, Salmonella typhi, Salmonella paratyphi types A, B typhus, Salmonella. dublin, Salmonella arizonae, Salmonella choleraesuis, Serratia marcescens, Schigella dysenteriae, Schigella flexneri, Schigella boydii, Schigella sonnei, Treponema, Stenotrophomonas maltophilia, Vibrio cholerae, Vibrio mimicus, Vibrio alginolyticus, Vibrio hollisae, Vibrio parahaemolyticus, Vibrio vulnificus, Yersinia pestitis, Actinomycetes, Bacillus anthracis, Bacillus subtilis, Clostridium tetani, Clostridium. perfingens, Clostridium botulinum, Clostridium tetani. Corynebacterium diphtheriae, Enterococcus faecalis, Enterococcus faecium, Erysipelothrix ruhsiopathiae, Listeria monocytogenes, Mycobacterium leprae, Mycobacterium tuberculosis, Mycoplasma, Nocardia, Propionibacerium, Pseudomonas aeruginosa, Pneumococci, Staphylococcus aureus, Staphylococcus epidermidis, methicillin resistant Staphylococcus aureus (MRSA), vancomycin resistant Staphylococcus aureus (VRSA), Staphylococcus lugdunensis, Staphylococcus saprophyticus, Streptococcus pneumonia, Streptococcus pyogenes, or Streptococcus mutants.

[0066] In some embodiments, the pathogen is a fungus, an amoeba, or a parasite. In specific embodiments, the fungus, the amoeba, or the parasite is Acanthamoeba spp, American tryppanosomiasis, Balamuthia mandnillanis, Babesia divergenes, Babesia bigemina, Babesia equi, Babesia microfti, Babesia duncani, Balantidium coli, Blastocystis spp Cryptosporidium spp, Cyclospora cayetanensis, dientamoeba fragilis, Diphyllobothrium latum, Leishmania amazonesis, Naegleria fowderi, Plasmodium falciparum, Plasmodium vivax, Plasmodium ovale curtisi, Plasmodium malariae, Rhinosporidium seeberi, Sarcocystis bovihominis, Sarcocystiss suihominis, Toxoplasma gondii, Trichmonas vaginalis, Trypanosoma brucei, Trypanosoma cruzi, and Taenia multiceps.

[0067] Certain embodiments include a method of delivering a polynucleotide to a target cell in a subject, the method comprising administering to the subject a zika virus or a zika-virus-like particle comprising the polynucleotide, wherein the polynucleotide is not a zika virus polynucleotide, and the target cell is a cell of the central nervous system. Certain embodiments include a method of delivering a polynucleotide to a subject, the method comprising administering to the subject a zika virus or a zika-virus-like particle comprising the polynucleotide, wherein the polynucleotide is not a zika virus polynucleotide, and the zika virus or zika-virus-like particle does not comprise a replicating zika virus. Certain embodiments include a method of delivering a polynucleotide to a subject, the method comprising administering to the subject a zika virus or a zika-virus-like particle comprising the polynucleotide, wherein the polynucleotide is not a zika virus polynucleotide, and the polynucleotide has a length up to about 10000 nucleotides. In some embodiments, the subject has a disease or disorder of the central nervous system. In some embodiments, the polynucleotide has a length greater than about 6000 nucleotides. In some embodiments, the subject is a human or non-human animal.

[0068] Certain embodiments include a zika virus or zika-virus-like particle comprising a polynucleotide exogenous to zika virus having a length of about 6,000 nucleotides to about 10,000 nucleotides, optionally wherein the polynucleotide does not encode a full-length viral structural protein or a full-length viral nonstructural protein. In some embodiments, the zika virus or zika-virus-like particle of claim 7, wherein the zika virus or zika-virus-like particle is produced from a nucleic acid comprising the polynucleotide. In some embodiments, the nucleic acid further comprises a zika virus 5′ UTR and a zika virus 3′ UTR. In some embodiments, the zika virus 5′ UTR is at least 90% homologous or identical to a zika virus 5′ UTR of Table 2, Table 1A, Table 1C, or Table 1H. In some embodiments, the zika virus 3′ UTR is at least 90% homologous or identical to a zika virus 3′ UTR of Table 2, Table 1A, Table 1B, or Table 1G. In some embodiments, the nucleic acid further comprises a polynucleotide encoding a first ribozyme. In some embodiments, the nucleic acid further comprises a polynucleotide encoding a second ribozyme. In some embodiments, the nucleic acid comprises a polynucleotide encoding a derivative of the zika virus C, wherein the derivative of the zika virus C is a truncation of about or less than about 5, 10, 15, 20, 25, or 30 amino acids of zika virus C. In some embodiments, the nucleic acid does not comprise a polynucleotide encoding a zika virus capsid protein (C) or a derivative of the zika virus C. In some embodiments, the nucleic acid does not comprise a polynucleotide encoding a zika virus viral membrane protein (prM/M) or a derivative of the zika virus prM/M. In some embodiments, the nucleic acid does not comprise a polynucleotide encoding a zika virus viral envelope protein (E) or a derivative of the zika virus E. In some embodiments, the nucleic acid does not comprise a polynucleotide encoding one or more non-structural (NS) proteins: (i) a NS1, (ii) a NS2A, (iii) a NS2B, (iv) a NS3, (v) a NS4A, (vi) a NS4B, (vii) a NS5, or (viii) two or more of (i)-(vii). In some embodiments, the nucleic acid further comprises a promoter. In some embodiments, the nucleic acid comprises a sequence of Tables 1A-1K, Table 2, or Table 3.

[0069] Certain embodiments include a nucleic acid composition comprising (i) a 5′ untranslated region (5′ UTR) of a first zika virus, (ii) a 3′ UTR of a second zika virus, wherein the first zika virus is optionally the same as the second zika virus, and (iii) a polynucleotide exogenous to the first zika virus and the second zika virus. In some embodiments, the polynucleotide is about 5000 bases to about 10000 bases in length. In some embodiments, the nucleic acid does not comprise a polynucleotide encoding a zika virus viral envelope protein (E) or a derivative of the zika virus E; and the nucleic acid does not comprise a polynucleotide encoding one or more non-structural (NS) proteins: (i) a NS1, (ii) a NS2A, (iii) a NS2B, (iv) a NS3, (v) a NS4A, (vi) a NS4B, (vii) a NS5, or (viii) two or more of (i)-(vii). In some embodiments, the nucleic acid composition comprises a sequence of Tables 1A-1K, Table 2 or Table 3. In some embodiments, the polynucleotide exogenous to the first zika virus and the second zika virus is an exogenous polynucleotide described herein.

### BRIEF DESCRIPTION OF THE DRAWINGS

[0070] The novel features of the invention are set forth with particularity in the appended claims. A better understanding of the features and advantages of the present invention will be obtained by reference to the following detailed description that sets forth illustrative embodiments, in which the principles of the invention are utilized, and the accompanying drawings (also “Figure” and “FIG.” herein), of which:

[0071] FIGS. 1A-E illustrates a diagram of an exemplary replicon described in the present disclosure, with different example applications. FIG. 1A shows the replicon structure, which comprises a vector, or a construct, or an mRNA, as a gene expressing without caping. It can include a C-partial protein. The replicon contains 2 report genes (GFP and Nluc) for proof-of-concept assay. FIG. 1B shows four possibilities of encapsulating the replicon in the delivery. Options 1 is the encapsulation by liposome or nanoparticle for use as a vaccine platform. To keep the CNS natural tropism, the replicon is derived from a wildtype (option 2), or a modified zika virus (option 3), or a eukaryotic expression vector transfection (option 4) comprising a second construct that contains the other structural ZIKV proteins. FIG. 1C shows encapsulating options 2 and 3 that contain both replicon and the zika virus genome, comprising a recombinant zika virus that can be used as anti-cancer therapies. FIG. 1D shows encapsulating options 2 and 3 that contain only the replicon (without zika virus genome), comprising the virus-like particle that can be used as a viral vector for CNS gene therapy. FIG. 1D shows the virus-like particle, containing only the Replicon RNA, derived from a eukaryotic expression vector transfection (option 4). This encapsulating process is virus-independent.

[0072] FIG. 2 illustrates a diagram of another exemplary replicon described in the present disclosure, in comparison with the wild-type zika virus genome.

[0073] FIG. 3 shows an exemplary imaging result of a cell transfected with plasmids carrying a GFP construct.

[0074] FIGS. 4A-4F shows a work flowchart of the generation of a recombinant zika virus from infecting construct-expressing cells with a wild-type zika virus, and microscopy results in bright field.

[0075] FIG. 5 shows a plasmid construct comprising a hammerhead ribozyme of a zika virus; (ii) a 5′untranslated region (UTR) of the zika virus; (iii) a C-partial of the zika virus; (iv) a 3′UTR of the zika virus; (v) a hepatitis delta virus (HDV) ribozyme of the zika virus, and two reporter genes (eGFP) and Nluc.

[0076] FIG. 6 shows a work flowchart of RNA transfection of in-vitro transcription products, and quantification of the expression of the exogenous reporter gene Nluc in cell lysate or supernatant of the transfected cells.

[0077] FIG. 7 shows production (steps 1-3) and delivery and expression of an exogenous gene (step 4) in Daoy and Vero cells using a zika virus.

[0078] FIG. 8 shows RT PCR from samples after 5 days post-infection of VERO cells with the ZIKV viral vector. Quantification of the RNA copies numbers present in the viral vector (pREP+ZIKV), are compared to ZIKV (submitted only to ZIKV infection), with pREP-specific TaqMan primers (black bars) and ZIKV (gray bars).

[0079] FIG. 9 shows the tropism of ZIKVV and the expression of the pREP delivered NanoNuc reporter gene in different types of cells. The control group has no viral infection, the ZIKV wild type group was infected with wild type ZIKA virus, and ZIKVV group was infected with the novel ZIKA virus viral vector.

[0080] FIG. 10 is an example construct comprising polycistronic luciferase and beta-galactosidase genes within a zika virus 5′ UTR and a zika virus 3′ UTR.

[0081] FIG. 11 is an example construct comprising a gene encoding a SARS-CoV-2 protein within a zika virus 5′ UTR and a zika virus 3′ UTR.

[0082] FIG. 12 provides graphs showing Luciferase and Beta-galactosidase quantification in Vero cells after transfection with pREP-Luc/Gal vector, compared to control cells (transfected only with lipofectamine). The high level of NanoLuc and Beta-galactosidase expression confirms the capacity of a ZIKV construct to deliver multiples genes.

[0083] FIG. 13 shows the ELISA results for detection of the recombinant SARS-CoV-2 Spike protein produced in Vero cells after the transfection with pREP mRNA construction containing the gene of interest that codifies the Spike protein.

[0084] FIGS. 14A-14E are example constructs having different lengths of partial capsid gene: 15 bp (FIG. 14A), 30 bp (FIG. 14B), 45 bp (FIG. 14C), 60 bp (FIG. 14D), and 75 bp (FIG. 14E).

[0085] FIGS. 15A-15B show biodistribution and tropism of ZIKVV in mice 6 hours after ZIKVV IP injection (FIG. 15A), and 48 hours after ZIKVV IP injection (FIG. 15B).

[0086] FIG. 16A shows pREP RNA encapsulation in all plasmids tested (FIGS. 14A-14E, C-partial with 15, 30, 45, 60 and 75 bp, respectively). The pREP RNA encapsulation was higher in plasmids with C-partial with 15, 30, 45, and 60 bp, indicating that ZIKVV carrying pREP RNA with Capsid with 20 or fewer amino acids is more efficiently encapsulated into the viral vector.

[0087] FIG. 16B shows that the encapsulation derived from DNA transfection was efficient and the plasmid with C-partial 45 bp had a higher amount of pREP RNA.

[0088] FIGS. 17A-17B show Nanoluc quantification in Vero cells after contact with viral vector (pREP+ZIKV) carrying 5, 10, 15, 20 and 25 amino acids, derived from both RNA (FIG. 17A) and DNA (FIG. 17B) transfection, compared to ZIKV (only in ZIKV infection). A higher level of NanoLuc expression is demonstrated in viral vectors of all capsid sequence sizes compared to the control group. These results indicate that ZIKVV is able to encapsulate pREP RNA with C-partial (15, 30, 45, 60 and 75 bp) and delivery NanoLuc, confirmed by the expression of the reporter gene in the target cells.

### DETAILED DESCRIPTION OF THE INVENTION

[0089] Various nucleic acid compositions are provided herein comprising an exogenous polynucleotide. The nucleic acid compositions may be useful for delivering the exogenous polynucleotide to a target cell. The target cell may be a cell of the central nervous system. The target cell may be present in a subject, where the nucleic acid compositions deliver the exogenous polynucleotide to the target cell in the subject. Certain nucleic acid compositions comprise an exogenous polynucleotide up to about 6,000 or 10,000 nucleotides in length, e.g., about 5 nucleotides to about 6,000 nucleotides. The nucleic acid compositions may comprise a 5′untranslated region (UTR) of a zika virus and a 3′UTR of the zika virus, and optionally do not comprise a polynucleotide encoding one or more nonstructural proteins of a virus, and further optionally do not comprise a polynucleotide encoding one or more structural proteins of a virus.

[0090] In one aspect, provided herein is a nucleic acid composition comprising (i) a polynucleotide encoding a ribozyme (ii) 5′untranslated region (UTR) of a zika virus; (iii) 3′UTR of the zika virus; and (iv) a polynucleotide exogenous to the zika virus. In some embodiments, the ribozyme is a hammerhead ribozyme or a hepatitis delta virus (HDV) ribozyme. In some embodiments, the nucleic acid further comprises a polynucleotide encoding a second ribozyme. In some specific embodiments, the second ribozyme is a hammerhead ribozyme or a hepatitis delta virus (HDV) ribozyme. In some embodiments, the polynucleotide encoding the ribozyme encodes a hammerhead ribozyme and the polynucleotide encoding the second ribozyme encodes an HDV ribozyme. In some embodiments, the nucleic acid composition further comprises a C-partial. For example, the C-partial is a derivative of C, where the derivative encodes a truncation (e.g., about or less than about 30, 25, 20, 15, 10, or 5 amino acids) of C.

[0091] In one aspect, provided herein is a nucleic acid composition comprising a sequence encoding one of the structural proteins from zika virus or its derivative with an exogenous polynucleotide. In a non-limiting example, the nucleic acid composition comprises a derivative of zika capsid protein (C), where the derivative encodes a truncation (e.g., about or less than about 30, 25, 20, 15, 10, or 5 amino acids) of C.

[0092] Non-limiting example nucleic acids herein may comprise one or more sequences from Tables 1A-1K, Table 2 and Table 3.

[0093] Further provided herein is a recombinant zika virus or a zika-virus-like particle that comprises all three structural proteins from zika virus or their derivative (a zika virus capsid protein (C) or the derivative of the zika virus C, a polynucleotide encoding a zika virus viral membrane protein (prM/M) or the derivative of the zika virus prM/M, a polynucleotide encoding a zika virus viral envelope protein (E) or the derivative of the zika virus E). Further provided herein is a method of using such recombinant zika virus or such zika-virus-like particle to deliver exogenous polynucleotides to a target cell. In preferred embodiments, such recombinant zika virus effectively crosses the blood brain barrier, resulting in a tropism targeting central nervous system (CNS). Accordingly, in preferred embodiments, such recombinant zika virus is used to deliver exogenous polynucleotides to CNS.

[0094] Before the present methods and compositions are described, it is to be understood that this disclosure is not limited to a particular method or composition described, and as such may vary. Unless defined otherwise, all technical and scientific terms used herein have the same meaning as commonly understood by one of ordinary skill in the art. All publications mentioned herein are incorporated by reference to disclose and describe the methods and/or materials in connection with which the publications are cited. It is understood that the present disclosure supersedes any disclosure of an incorporated publication to the extent there is a contradiction.

[0095] As will be apparent to those of skill in the art upon reading this disclosure, each of the individual embodiments described and illustrated herein has discrete components and features which may be readily separated from or combined with the features of any of the other several embodiments without departing from the scope or spirit of the present disclosure. Any recited method can be carried out in the order of events recited or in any other order which is logically possible.

[0096] Where a range of values is provided, unless otherwise indicated, each intervening value to the tenth of the unit of the lower limit between the upper and lower limits of that range is also specifically disclosed. Each smaller range between any stated value or intervening value in a stated range is encompassed herein. The upper and lower limits of these smaller ranges may independently be included or excluded in the range, and each range where either, neither or both limits are included in the smaller ranges is also encompassed herein, subject to any specifically excluded limit in the stated range. Where the stated range includes one or both of the limits, ranges excluding either or both of those included limits are also included.

[0097] The term “about” or “approximately” can mean within an acceptable error range for the particular value as determined by one of ordinary skill in the art, which will depend in part on how the value is measured or determined, e.g., the limitations of the measurement system. For example, “about” can mean within 1 or more than 1 standard deviation, per the practice in the given value. Where particular values are described in the application and claims, unless otherwise stated the term “about” should be assumed to mean an acceptable error range for the particular value, such as ±10% of the value modified by the term “about”.

[0098] The terms “individual,” “patient,” or “subject” can be used interchangeably. None of the terms require or are limited to situation characterized by the supervision (e.g. constant or intermittent) of a health care worker (e.g. a doctor, a registered nurse, a nurse practitioner, a physician's assistant, an orderly, or a hospice worker). In some embodiments, patients, subjects, or individuals can be under the supervision of a health care worker.

[0099] The terms “heterologous nucleic acid sequence,” or “exogenous nucleic acid sequence,” or “transgenes,” as used herein, in relation to a specific virus can refer to a nucleic acid sequence that originates from a source other than the specified virus.

[0100] The terms “inhibiting,” “reducing” or “prevention,” or any variation of these terms, referred to herein, can include any measurable decrease or complete inhibition to achieve a desired result.

[0101] A “promoter,” as used herein, can be a control sequence that is a region of a nucleic acid sequence at which initiation and rate of transcription are controlled. In certain embodiments, a promoter may contain genetic elements at which regulatory proteins and molecules may bind such as RNA polymerase and other transcription factors. The terms “operatively positioned,” “operatively linked,” “under control” and “under transcriptional control” can mean that a promoter is in a correct functional location and/or orientation in relation to a nucleic acid sequence to control transcriptional initiation and/or expression of that sequence. In certain embodiments, a promoter may or may not be used in conjunction with an “enhancer,” which refers to a cis-acting regulatory sequence involved in the transcriptional activation of a nucleic acid sequence.

[0102] The term “percentage identical to,” as used herein, may be to calculations of “homology” or “percent homology” between two or more nucleotide or amino acid sequences that can be determined by aligning the sequences for optimal comparison purposes (e.g., gaps can be introduced in the sequence of a first sequence). The nucleotides at corresponding positions may then be compared, and the percent identity between the two sequences may be a function of the number of identical positions shared by the sequences (i.e., % homology=# of identical positions/total # of positions×100). For example, a position in the first sequence may be occupied by the same nucleotide as the corresponding position in the second sequence, then the molecules are identical at that position. The percent homology between the two sequences may be a function of the number of identical positions shared by the sequences, taking into account the number of gaps, and the length of each gap, which need to be introduced for optimal alignment of the two sequences. In some embodiments, the length of a sequence aligned for comparison purposes may be at least about: 30%, 40%, 50%, 60%, 65%, 70%, 75%, 80%, 85%, 90%, 91%, 92%, 93%, 94%, 95%, 96%, 97%, 98%, or 95%, of the length of the reference sequence. A BLAST® search may determine homology between two sequences. The homology can be between the entire lengths of two sequences or between fractions of the entire lengths of two sequences. The two sequences can be genes, nucleotides sequences, protein sequences, peptide sequences, amino acid sequences, or fragments thereof. The actual comparison of the two sequences can be accomplished by well-known methods, for example, using a mathematical algorithm. A non-limiting example of such a mathematical algorithm may be described in Karlin, S. and Altschul, S., Proc. Natl. Acad. Sci. USA, 90-5873-5877 (1993). Such an algorithm may be incorporated into the NBLAST and XBLAST programs (version 2.0), as described in Altschul, S. et al., Nucleic Acids Res., 25:3389-3402 (1997). When utilizing BLAST and Gapped BLAST programs, any relevant parameters of the respective programs (e.g., NBLAST) can be used. For example, parameters for sequence comparison can be set at score=100, word length=12, or can be varied (e.g., W=5 or W=20). Other examples include the algorithm of Myers and Miller, CABIOS (1989), ADVANCE, ADAM, BLAT, and FASTA. In another embodiment, the percent identity between two amino acid sequences can be accomplished using, for example, the GAP program in the GCG software package (Accelrys, Cambridge, UK).

[0103] The term “subject” can refer to an animal, including, but not limited to, a primate (e.g., human), cow, sheep, goat, horse, dog, cat, rabbit, rat, or mouse. The terms “subject” and “patient” are used interchangeably herein in reference, for example, to a mammalian subject, such as a human subject, or to a non-human subject.

[0104] The terms “treat,” “treating,” and “treatment” can be meant to include alleviating or abrogating a disorder, disease, or condition; or one or more of the symptoms associated with the disorder, disease, or condition; or alleviating or eradicating the cause(s) of the disorder, disease, or condition itself. Desirable effects of treatment can include, but are not limited to, preventing occurrence or recurrence of disease, alleviation of symptoms, diminishing any direct or indirect pathological consequences of the disease, preventing metastasis, decreasing the rate of disease progression, amelioration or palliation of the disease state and remission or improved prognosis.

[0105] The term “therapeutically effective amount” can refer to the amount of a compound that, when administered, can be sufficient to prevent development of, or alleviate to some extent, one or more of the symptoms of the disorder, disease, or condition being treated. The term “therapeutically effective amount” can also refer to the amount of a compound that is sufficient to elicit the biological or medical response of a cell, tissue, system, animal, or human that is being sought by a researcher, veterinarian, medical doctor, or clinician.

[0106] The term “pharmaceutically acceptable carrier,” “pharmaceutically acceptable excipient,” “physiologically acceptable carrier,” or “physiologically acceptable excipient” can refer to a pharmaceutically-acceptable material, composition, or vehicle, such as a liquid or solid filler, diluent, excipient, solvent, or encapsulating material. A component can be “pharmaceutically acceptable” in the sense of being compatible with the other ingredients of a pharmaceutical formulation. It can also be suitable for use in contact with the tissue or organ of humans and animals without excessive toxicity, irritation, allergic response, immunogenicity, or other problems or complications, commensurate with a reasonable benefit/risk ratio. See, Remington: The Science and Practice of Pharmacy, 21st Edition; Lippincott Williams & Wilkins: Philadelphia, PA, 2005; Handbook of Pharmaceutical Excipients, 5th Edition; Rowe et al., Eds., The Pharmaceutical Press and the American Pharmaceutical Association: 2005; and Handbook of Pharmaceutical Additives, 3rd Edition; Ash and Ash Eds., Gower Publishing Company: 2007; Pharmaceutical Preformulation and Formulation, Gibson Ed., CRC Press LLC: Boca Raton, FL, 2004).

[0107] The term “pharmaceutical composition” can refer to a mixture of a compound disclosed herein with other chemical components, such as diluents or carriers. The pharmaceutical composition can facilitate administration of the compound to an organism. Multiple techniques of administering a compound exist in the art including, but not limited to, oral, injection, aerosol, parenteral, and topical administration. Pharmaceutical compositions can also be obtained by reacting compounds with inorganic or organic acids such as hydrochloric acid, hydrobromic acid, sulfuric acid, nitric acid, phosphoric acid, methanesulfonic acid, ethanesulfonic acid, p-toluenesulfonic acid, salicylic acid and the like.

[0108] The term “zika-virus-like particle” can refer to a nanoscale multiprotein structure that is made up of assembled zika viral proteins and mimic the organization and conformation of the zika virus but without viral genetic material and are therefore non-infectious. The zika-virus-like particle could closely resemble zika virus.

[0109] In some embodiments, as used here a “derivative” of a polypeptide or polynucleotide refers to a sequence at least 80% identical to the polypeptide or polynucleotide, respectively. In some embodiments, as used here a “derivative” of a polypeptide or polynucleotide refers to a sequence at least 80% homologous to the polypeptide or polynucleotide, respectively. In some embodiments, as used herein, a “derivative” of a polypeptide or polynucleotide refers to a sequence with no or no more than 1, 2, 3, 4, 5, 6, 7, 8, 9, or 10 amino acid or nucleotide substitutions, insertions, or deletions as compared to the polypeptide or polynucleotide, respectively.

### Nucleic Acid Compositions

[0110] In one aspect, provided herein is a nucleic acid composition comprising (i) a polynucleotide encoding a zika virus capsid protein (C) or the derivative of the zika virus C, a polynucleotide encoding a zika virus viral membrane protein (prM/M) or the derivative of the zika virus prM/M, a polynucleotide encoding a zika virus viral envelope protein (E) or the derivative of the zika virus E, or any combination thereof; and (ii) a polynucleotide exogenous to the zika virus.

[0111] In another aspect, provided herein is a nucleic acid composition comprising a zika virus 5′ UTR, a zika virus 3′ UTR, and a polynucleotide exogenous to a zika virus. In some embodiments, the nucleic acid does not comprise: a polynucleotide encoding a zika virus capsid protein (C) or the derivative of the zika virus C, a polynucleotide encoding a zika virus viral membrane protein (prM/M) or the derivative of the zika virus prM/M, a polynucleotide encoding a zika virus viral envelope protein (E) or the derivative of the zika virus E, or any combination thereof.

Structural and Non-Structural Proteins from Zika Virus

[0112] A wild-type zika virus genome comprises a 10.8-kilobase single-stranded positive-sense RNA that codes for three structural proteins (C, prM/M, and envelope E) and seven non-structural proteins (NS1, NS2A, NS2B, NS3, NS4A, NS4B, and NS5). In addition, there are short UTRs on both the 5′ and 3′ ends of the genome. Provided herein are various embodiments to generate a recombinant zika virus that comprises at least one or all of the three structural proteins. In some embodiments, a nucleic acid is provided for generating the recombinant zika virus, wherein the nucleic acid is lacking a polynucleotide encoding for one or more, or all, of the zika virus structural proteins and zika virus nonstructural proteins. The nucleic acid may comprise a zika virus 5′ UTR and a zika virus 3′ UTR, and an exogenous nucleic acid.

[0113] In some embodiments, the nucleic acid composition comprises the polynucleotide encoding the zika virus C, the polynucleotide encoding the zika virus prM/M, and the polynucleotide encoding the zika virus E. When the three structural proteins are expressed as the nucleic acid composition described herein, in some embodiments, they could be expressed in one nucleic acid. When three structural proteins are expressed as the nucleic acid composition described herein, in other embodiments, they could be expressed in more than one nucleic acids.

[0114] In some embodiments, the polynucleotide encoding the derivative of the zika virus C comprises at least one substitution, at least one deletion, and/or at least one insertion as compared to a wild-type zika virus C. In specific embodiments, the zika virus C or the derivative of the zika virus C comprises an amino acid sequence at least 90%, 91%, 92%, 93%, 94%, 95%, 96%, 97%, 98%, 99%, or 100% identical to a sequence of Table 1A, Table 1D, Table 1I, Table 2, or Table 3. In specific embodiments, the nucleic acid composition comprises a derivative of the zika virus C encoding an amino acid sequence at least 90%, 91%, 92%, 93%, 94%, 95%, 96%, 97%, 98%, 99%, or 100% identical to a wild type C sequence. In specific embodiments, the nucleic acid composition comprises a derivative of the zika virus C encoding an amino acid sequence at least 95% identical to a wild type C sequence. In specific embodiments, the nucleic acid composition comprises a derivative of the zika virus C encoding an amino acid sequence at least 96% identical to a wild type C sequence. In specific embodiments, the nucleic acid composition comprises a derivative of the zika virus C encoding an amino acid sequence at least 97% identical to a wild type C sequence. In specific embodiments, the nucleic acid composition comprises a derivative of the zika virus C encoding an amino acid sequence at least 98% identical to a wild type C sequence. In specific embodiments, the nucleic acid composition comprises a derivative of the zika virus C encoding an amino acid sequence at least 99% identical to a wild type C sequence. In some embodiments, the nucleic acid composition comprises a derivative of zika virus C encoding about 5 to about 30 amino acids of a sequence at least 90%, 91%, 92%, 93%, 94%, 95%, 96%, 97%, 98%, 99%, or 100% identical to a sequence of Table 1A, Table 1D, Table 1I, Table 2, Table 3, or a wild-type zika virus.

[0115] In some embodiments, the polynucleotide encoding the derivative of the zika virus prM/M comprises at least one substitution, at least one deletion, and/or at least one insertion as compared to a wild-type zika virus prM/M. In some embodiments, the zika virus prM/M or the derivative of the zika virus prM/M comprises a sequence at least 90%, 91%, 92%, 93%, 94%, 95%, 96%, 97%, 98%, 99%, or 100% identical to a sequence of Table 1A, Table 1F, or Table 1K. In specific embodiments, the nucleic acid composition comprises a derivative of the zika virus prM/M encoding an amino acid sequence at least 95% identical to a wild type prM/M sequence. In specific embodiments, the nucleic acid composition comprises a derivative of the zika virus prM/M encoding an amino acid sequence at least 96% identical to a wild type prM/M sequence. In specific embodiments, the nucleic acid composition comprises a derivative of the zika virus prM/M encoding an amino acid sequence at least 97% identical to a wild type prM/M sequence. In specific embodiments, the nucleic acid composition comprises a derivative of the zika virus prM/M encoding an amino acid sequence at least 98% identical to a wild type prM/M sequence. In specific embodiments, the nucleic acid composition comprises a derivative of the zika virus prM/M encoding an amino acid sequence at least 99% identical to a wild type prM/M sequence.

[0116] In some embodiments, the polynucleotide encoding the derivative of the zika virus E comprises at least one substitution, at least one deletion, and/or at least one insertion as compared to a wild-type zika virus E. In some embodiments, the polynucleotide encoding E is translated into a wild zika virus type E. In some embodiments, the zika virus E or the derivative of the zika virus E comprises a sequence at least 90%, 91%, 92%, 93%, 94%, 95%, 96%, 97%, 98%, 99%, or 100% identical to sequence of Table 1A, Table IE, or Table 1J. In specific embodiments, the nucleic acid composition comprises a derivative of the zika E encoding an amino acid sequence at least 95% identical to a wild type E sequence. In specific embodiments, the nucleic acid composition comprises a derivative of the zika virus E encoding an amino acid sequence at least 96% identical to a wild type E sequence. In specific embodiments, the nucleic acid composition comprises a derivative of the zika virus E encoding an amino acid sequence at least 97% identical to a wild type E sequence. In specific embodiments, the nucleic acid composition comprises a derivative of the zika virus E encoding an amino acid sequence at least 98% identical to a wild type E sequence. In specific embodiments, the nucleic acid composition comprises a derivative of the zika virus E encoding an amino acid sequence at least 99% identical to a wild type E sequence.

[0117] In some embodiments, the nucleic acid composition comprises a 5′ untranslated region (5′ UTR) of the zika virus. In some embodiments, the nucleic acid composition comprises a 3′ untranslated region (3′ UTR) of the zika virus. Non-limiting example untranslated sequences are provided in Table 1A, Table 1B, Table 1C, Table 1G, Table 1H, or Table 2. In some embodiments, the zika virus 5′ UTR comprises a sequence at least 90%, 91%, 92%, 93%, 94%, 95%, 96%, 97%, 98%, 99%, or 100% identical to sequence of Table 1A, Table 1C, Table 1H, or Table 2. In some embodiments, the zika virus 3′ UTR comprises a sequence at least 90%, 91%, 92%, 93%, 94%, 95%, 96%, 97%, 98%, 99%, or 100% identical to sequence of Table 1A, Table 1B, Table 1G, or Table 2.

[0118] In some embodiments, the nucleic acid composition does not comprise a polynucleotide encoding one or more non-structural (NS) proteins selected from (i) a NS1, (ii) a NS2A, (iii) a NS2B, (iv) a NS3, (v) a NS4A, (vi) a NS4B, (vii) a NS5, or (viii) two or more of (i)-(vii). For example, if the nucleic acid does not comprise such polynucleotide(s), there is additional space in the composition to accommodate a large exogenous polynucleotide (e.g., up to about 10000 or 6000 bases).

[0119] In other embodiments, the nucleic acid composition comprises polynucleotide encoding one or more non-structural (NS) proteins selected from (i) a NS1, (ii) a NS2A, (iii) a NS2B, (iv) a NS3, (v) a NS4A, (vi) a NS4B, (vii) a NS5, or (viii) two or more of (i)-(vii).

[0120] In certain embodiments, the nucleic acid composition comprises a polynucleotide encoding a NS1 protein. In certain embodiments, the nucleic acid composition comprises a polynucleotide encoding a NS2A protein. In certain embodiments, the nucleic acid composition comprises a polynucleotide encoding a NS2B protein. In certain embodiments, the nucleic acid composition comprises a polynucleotide encoding a NS3 protein. In certain embodiments, the nucleic acid composition comprises a polynucleotide encoding a NS4A protein. In certain embodiments, the nucleic acid composition comprises a polynucleotide encoding a NS4B protein. In certain embodiments, the nucleic acid composition comprises a polynucleotide encoding a NS5 protein.

[0121] In certain embodiments, the nucleic acid composition comprises a polynucleotide encoding a NS1 and a NS2A. In certain embodiments, the nucleic acid composition comprises a polynucleotide encoding a NS1 and a NS2B. In certain embodiments, the nucleic acid composition comprises a polynucleotide encoding a NS1 and a NS3. In certain embodiments, the nucleic acid composition comprises a polynucleotide encoding a NS1 and a NS4A. In certain embodiments, the nucleic acid composition comprises a polynucleotide encoding a NS1 and a NS4B. In certain embodiments, the nucleic acid composition comprises a polynucleotide encoding a NS1 and a NS5.

[0122] In certain embodiments, the nucleic acid composition comprises a polynucleotide encoding a NS2A and a NS2B. In certain embodiments, the nucleic acid composition comprises a polynucleotide encoding a NS2A and a NS3. In certain embodiments, the nucleic acid composition comprises a polynucleotide encoding a NS2A and a NS4A. In certain embodiments, the nucleic acid composition comprises a polynucleotide encoding a NS2A and a NS4B. In certain embodiments, the nucleic acid composition comprises a polynucleotide encoding a NS2A and a NS5.

[0123] In certain embodiments, the nucleic acid composition comprises a polynucleotide encoding a NS2B and a NS3. In certain embodiments, the nucleic acid composition comprises a polynucleotide encoding a NS2B and a NS4A. In certain embodiments, the nucleic acid composition comprises a polynucleotide encoding a NS2B and a NS4B. In certain embodiments, the nucleic acid composition comprises a polynucleotide encoding a NS2B and a NS5.

[0124] In certain embodiments, the nucleic acid composition comprises a polynucleotide encoding a NS3 and a NS4A. In certain embodiments, the nucleic acid composition comprises a polynucleotide encoding a NS3 and a NS4B. In certain embodiments, the nucleic acid composition comprises a polynucleotide encoding a NS3 and a NS5.

[0125] In certain embodiments, the nucleic acid composition comprises a polynucleotide encoding a NS4A and a NS4B. In certain embodiments, the nucleic acid composition comprises a polynucleotide encoding a NS4A and a NS5.

[0126] In certain embodiments, the nucleic acid composition comprises a polynucleotide encoding a NS4B and a NS5.

[0127] In certain embodiments, the nucleic acid composition comprises a polynucleotide encoding a NS1, a NS2A, and NS2B. In certain embodiments, the nucleic acid composition comprises a polynucleotide encoding a NS1, a NS2A, and NS3. In certain embodiments, the nucleic acid composition comprises a polynucleotide encoding a NS1, a NS2A, and NS4A. In certain embodiments, the nucleic acid composition comprises a polynucleotide encoding a NS1, a NS2A, and NS4B. In certain embodiments, the nucleic acid composition comprises a polynucleotide encoding a NS1, a NS2A, and NS5.

[0128] In certain embodiments, the nucleic acid composition comprises a polynucleotide encoding a NS1, a NS2B, and NS3. In certain embodiments, the nucleic acid composition comprises a polynucleotide encoding a NS1, a NS2B, and NS4A. In certain embodiments, the nucleic acid composition comprises a polynucleotide encoding a NS1, a NS2B, and NS4B. In certain embodiments, the nucleic acid composition comprises a polynucleotide encoding a NS1, a NS2B, and NS5.

[0129] In certain embodiments, the nucleic acid composition comprises a polynucleotide encoding a NS1, a NS3, and NS4A. In certain embodiments, the nucleic acid composition comprises a polynucleotide encoding a NS1, a NS3, and NS4B. In certain embodiments, the nucleic acid composition comprises a polynucleotide encoding a NS1, a NS3, and NS5.

[0130] In certain embodiments, the nucleic acid composition comprises a polynucleotide encoding a NS1, a NS4A, and a NS4B. In certain embodiments, the nucleic acid composition comprises a polynucleotide encoding a NS1, a NS4A, and a NS5.

[0131] In certain embodiments, the nucleic acid composition comprises a polynucleotide encoding a NS1, a NS4B, and a NS5.

[0132] In certain embodiments, the nucleic acid composition comprises a polynucleotide encoding a NS2A, a NS2B, and a NS3. In certain embodiments, the nucleic acid composition comprises a polynucleotide encoding a NS2A, a NS2B, and a NS4A. In certain embodiments, the nucleic acid composition comprises a polynucleotide encoding a NS2A, a NS2B, and a NS4B. In certain embodiments, the nucleic acid composition comprises a polynucleotide encoding a NS2A, a NS2B, and a NS5.

[0133] In certain embodiments, the nucleic acid composition comprises a polynucleotide encoding a NS2A, a NS3, and a NS4A. In certain embodiments, the nucleic acid composition comprises a polynucleotide encoding a NS2A, a NS3, and a NS4B. In certain embodiments, the nucleic acid composition comprises a polynucleotide encoding a NS2A, a NS3, and a NS5.

[0134] In certain embodiments, the nucleic acid composition comprises a polynucleotide encoding a NS2A, a NS4A, and a NS4B. In certain embodiments, the nucleic acid composition comprises a polynucleotide encoding a NS2A, a NS4A, and a NS5.

[0135] In certain embodiments, the nucleic acid composition comprises a polynucleotide encoding a NS2A, a NS4B, and a NS5.

[0136] In certain embodiments, the nucleic acid composition comprises a polynucleotide encoding a NS2B, a NS3, and a NS4A. In certain embodiments, the nucleic acid composition comprises a polynucleotide encoding a NS2B, a NS3, and a NS4B. In certain embodiments, the nucleic acid composition comprises a polynucleotide encoding a NS2B, a NS3, and a NS5.

[0137] In certain embodiments, the nucleic acid composition comprises a polynucleotide encoding a NS2B, a NS4A, and NS5.

[0138] In certain embodiments, the nucleic acid composition comprises a polynucleotide encoding a NS2B, a NS4B, and a NS5.

[0139] In certain embodiments, the nucleic acid composition comprises a polynucleotide encoding a NS3 and a NS4A, and a NS5.

[0140] In certain embodiments, the nucleic acid composition comprises a polynucleotide encoding a NS3, a NS4B, and a NS5.

[0141] In certain embodiments, the nucleic acid composition comprises a polynucleotide encoding a NS4A, a NS4B, and a NS5.

[0142] In certain embodiments, the nucleic acid composition comprises a polynucleotide encoding all NS proteins except a NS1, a NS2A, and NS2B. In certain embodiments, the nucleic acid composition comprises a polynucleotide encoding all NS proteins except a NS1, a NS2A, and NS3. In certain embodiments, the nucleic acid composition comprises a polynucleotide encoding all NS proteins except a NS1, a NS2A, and NS4A. In certain embodiments, the nucleic acid composition comprises a polynucleotide encoding all NS proteins except a NS1, a NS2A, and NS4B. In certain embodiments, the nucleic acid composition comprises a polynucleotide encoding all NS proteins except a NS1, a NS2A, and NS5.

[0143] In certain embodiments, the nucleic acid composition comprises a polynucleotide encoding all NS proteins except a NS1, a NS2B, and NS3. In certain embodiments, the nucleic acid composition comprises a polynucleotide encoding all NS proteins except a NS1, a NS2B, and NS4A. In certain embodiments, the nucleic acid composition comprises a polynucleotide encoding all NS proteins except a NS1, a NS2B, and NS4B. In certain embodiments, the nucleic acid composition comprises a polynucleotide encoding all NS proteins except a NS1, a NS2B, and NS5.

[0144] In certain embodiments, the nucleic acid composition comprises a polynucleotide encoding all NS proteins except a NS1, a NS3, and NS4A. In certain embodiments, the nucleic acid composition comprises a polynucleotide encoding all NS proteins except a NS1, a NS3, and NS4B. In certain embodiments, the nucleic acid composition comprises a polynucleotide encoding all NS proteins except a NS1, a NS3, and NS5.

[0145] In certain embodiments, the nucleic acid composition comprises a polynucleotide encoding all NS proteins except a NS1, a NS4A, and a NS4B. In certain embodiments, the nucleic acid composition comprises a polynucleotide encoding all NS proteins except a NS1, a NS4A, and a NS5.

[0146] In certain embodiments, the nucleic acid composition comprises a polynucleotide encoding all NS proteins except a NS1, a NS4B, and a NS5.

[0147] In certain embodiments, the nucleic acid composition comprises a polynucleotide encoding all NS proteins except a NS2A, a NS2B, and a NS3. In certain embodiments, the nucleic acid composition comprises a polynucleotide encoding all NS proteins except a NS2A, a NS2B, and a NS4A. In certain embodiments, the nucleic acid composition comprises a polynucleotide encoding all NS proteins except a NS2A, a NS2B, and a NS4B. In certain embodiments, the nucleic acid composition comprises a polynucleotide encoding all NS proteins except a NS2A, a NS2B, and a NS5.

[0148] In certain embodiments, the nucleic acid composition comprises a polynucleotide encoding all NS proteins except a NS2A, a NS3, and a NS4A. In certain embodiments, the nucleic acid composition comprises a polynucleotide encoding all NS proteins except a NS2A, a NS3, and a NS4B. In certain embodiments, the nucleic acid composition comprises a polynucleotide encoding all NS proteins except a NS2A, a NS3, and a NS5.

[0149] In certain embodiments, the nucleic acid composition comprises a polynucleotide encoding all NS proteins except a NS2A, a NS4A, and a NS4B. In certain embodiments, the nucleic acid composition comprises a polynucleotide encoding all NS proteins except a NS2A, a NS4A, and a NS5.

[0150] In certain embodiments, the nucleic acid composition comprises a polynucleotide encoding all NS proteins except a NS2A, a NS4B, and a NS5.

[0151] In certain embodiments, the nucleic acid composition comprises a polynucleotide encoding all NS proteins except a NS2B, a NS3, and a NS4A. In certain embodiments, the nucleic acid composition comprises a polynucleotide encoding all NS proteins except a NS2B, a NS3, and a NS4B. In certain embodiments, the nucleic acid composition comprises a polynucleotide encoding all NS proteins except a NS2B, a NS3, and a NS5.

[0152] In certain embodiments, the nucleic acid composition comprises a polynucleotide encoding all NS proteins except a NS2B, a NS4A, and NS5.

[0153] In certain embodiments, the nucleic acid composition comprises a polynucleotide encoding all NS proteins except all NS proteins except a NS2B, a NS4B, and a NS5.

[0154] In certain embodiments, the nucleic acid composition comprises a polynucleotide encoding all NS proteins except a NS3 and a NS4A, and a NS5.

[0155] In certain embodiments, the nucleic acid composition comprises a polynucleotide encoding all NS proteins except a NS3, a NS4B, and a NS5.

[0156] In certain embodiments, the nucleic acid composition comprises a polynucleotide encoding all NS proteins except a NS4A, a NS4B, and a NS5.

[0157] In certain embodiments, the nucleic acid composition comprises a polynucleotide encoding all NS proteins except a NS1 and a NS2A. In certain embodiments, the nucleic acid composition comprises a polynucleotide encoding all NS proteins except a NS1 and a NS2B. In certain embodiments, the nucleic acid composition comprises a polynucleotide encoding all NS proteins except a NS1 and a NS3. In certain embodiments, the nucleic acid composition comprises a polynucleotide encoding all NS proteins except all NS proteins except a NS1 and a NS4A. In certain embodiments, the nucleic acid composition comprises a polynucleotide encoding all NS proteins except a NS1 and a NS4B. In certain embodiments, the nucleic acid composition comprises a polynucleotide encoding all NS proteins except a NS1 and a NS5.

[0158] In certain embodiments, the nucleic acid composition comprises a polynucleotide encoding all NS proteins except a NS2A and a NS2B. In certain embodiments, the nucleic acid composition comprises a polynucleotide encoding all NS proteins except a NS2A and a NS3. In certain embodiments, the nucleic acid composition comprises a polynucleotide encoding all NS proteins except a NS2A and a NS4A. In certain embodiments, the nucleic acid composition comprises a polynucleotide encoding all NS proteins except a NS2A and a NS4B. In certain embodiments, the nucleic acid composition comprises a polynucleotide encoding all NS proteins except a NS2A and a NS5.

[0159] In certain embodiments, the nucleic acid composition comprises a polynucleotide encoding all NS proteins except a NS2B and a NS3. In certain embodiments, the nucleic acid composition comprises a polynucleotide encoding all NS proteins except a NS2B and a NS4A. In certain embodiments, the nucleic acid composition comprises a polynucleotide encoding all NS proteins except a NS2B and a NS4B. In certain embodiments, the nucleic acid composition comprises a polynucleotide encoding all NS proteins except a NS2B and a NS5.

[0160] In certain embodiments, the nucleic acid composition comprises a polynucleotide encoding all NS proteins except a NS3 and a NS4A. In certain embodiments, the nucleic acid composition comprises a polynucleotide encoding all NS proteins except a NS3 and a NS4B. In certain embodiments, the nucleic acid composition comprises a polynucleotide encoding all NS proteins except a NS3 and a NS5.

[0161] In certain embodiments, the nucleic acid composition comprises a polynucleotide encoding all NS proteins except a NS4A and a NS4B. In certain embodiments, the nucleic acid composition comprises a polynucleotide encoding all NS proteins except a NS4A and a NS5.

[0162] In certain embodiments, the nucleic acid composition comprises a polynucleotide encoding all NS proteins except a NS4B and a NS5.

[0163] In certain embodiments, the nucleic acid composition comprises a polynucleotide encoding all NS proteins except a NS1. In certain embodiments, the nucleic acid composition comprises a polynucleotide encoding all NS proteins except a NS2A. In certain embodiments, the nucleic acid composition comprises a polynucleotide encoding all NS proteins except a NS2B. In certain embodiments, the nucleic acid composition comprises a polynucleotide encoding all NS proteins except a NS3. In certain embodiments, the nucleic acid composition comprises a polynucleotide encoding all NS proteins except a NS4A. In certain embodiments, the nucleic acid composition comprises a polynucleotide encoding all NS proteins except a NS4B. In certain embodiments, the nucleic acid composition comprises a polynucleotide encoding all NS proteins except a NS5.

[0164] In some embodiments, the NS1 is a zika virus NS1. In some embodiments, the NS2A is a zika virus NS2A. In some embodiments, the NS2B is a zika virus NS2B. In some embodiments, the NS3 is a zika virus NS3. In some embodiments, the NS4A is a zika virus NS4A. In some embodiments, the NS4B is a zika virus NS4B. In some embodiments, the NS5 is a zika virus NS5.

[0165] In some embodiments, the nucleic acid composition comprises a derivative of NS1 that comprises an amino acid sequence at least 80%, at least 90%, at least 95%, at least 96%, at least 97%, at least 98%, at least 99% identical to a wild-type NS1 sequence of Table 1A. In some embodiments, the nucleic acid composition comprises a derivative of NS2A that comprises an amino acid sequence at least 80%, at least 90%, at least 95%, at least 96%, at least 97%, at least 98%, at least 99% identical to a wild-type NS2A sequence of Table 1A. In some embodiments, the nucleic acid composition comprises a derivative of NS2B that comprises an amino acid sequence at least 80%, at least 90%, at least 95%, at least 96%, at least 97%, at least 98%, at least 99% identical to a wild-type NS2B sequence of Table 1A. In some embodiments, the nucleic acid composition comprises a derivative of NS3 that comprises an amino acid sequence at least 80%, at least 90%, at least 95%, at least 96%, at least 97%, at least 98%, at least 99% identical to a wild-type NS3 sequence of Table 1A. In some embodiments, the nucleic acid composition comprises a derivative of NS4A that comprises an amino acid sequence at least 80%, at least 90%, at least 95%, at least 96%, at least 97%, at least 98%, at least 99% identical to a wild-type NS4A sequence of Table 1A. In some embodiments, the nucleic acid composition comprises a derivative of NS4B that comprises an amino acid sequence at least 80%, at least 90%, at least 95%, at least 96%, at least 97%, at least 98%, at least 99% identical to a wild-type NS4B sequence of Table 1A. In some embodiments, the nucleic acid composition comprises a derivative of NS5 that comprises an amino acid sequence at least 80%, at least 90%, at least 95%, at least 96%, at least 97%, at least 98%, at least 99% identical to a wild-type NS5 sequence.

[0166] In some embodiments, the components of the nucleic acid composition comprise African zika virus components, Asian zika virus components, or Brazilian zika virus components, or a combination thereof. In one specific embodiment, the zika virus is African MR766 strain.

### Exogenous Polynucleotides

[0167] In some embodiments, the exogeneous polynucleotide is about or up to about 10000, 9000, 8000, 7000, 6000, or 5000 nucleotides long. For example, the exogenous polynucleotide is about 50 to about 10000, 9000, 8000, 7000, 6000, or 5000 nucleotides long. The exogenous polynucleotide may be about 100 to about 10000, 9000, 8000, 7000, 6000, or 5000 nucleotides long. The exogenous polynucleotide may be about 50 to about 6000 nucleotides long. The exogenous polynucleotide may be about 100 to about 6000 nucleotides long. The exogenous polynucleotide may be about 50 to about 5000 nucleotides long. The exogenous polynucleotide may be about 100 to about 5000 nucleotides long.

[0168] In some embodiments, the exogeneous polynucleotide is about 0.1 kb nucleotides long. In other embodiments, the exogenous sequence is about 0.2 kb long. In other embodiments, the exogenous sequence is about 0.3 kb long. In other embodiments, the exogenous sequence is about 0.4 kb long. In other embodiments, the exogenous sequence is about 0.5 kb long. In other embodiments, the exogenous sequence is about 0.6 kb long. In other embodiments, the exogenous sequence is about 0.7 kb long. In other embodiments, the exogenous sequence is about 0.8 kb long. In other embodiments, the exogenous sequence is about 0.9 kb long. In other embodiments, the exogenous sequence is about 1 kb nucleotides long. In other embodiments, the exogeneous polynucleotide is about 2 kb nucleotides long. In some embodiments, the exogeneous polynucleotide is about 3 kb nucleotides long. In some embodiments, the exogeneous polynucleotide is about 4 kb nucleotides long. In some embodiments, the exogeneous polynucleotide is about 5 kb nucleotides long. In some embodiments, the exogeneous polynucleotide is about 6 kb nucleotides long. In some embodiments, the exogeneous polynucleotide is about 7 kb nucleotides long. In some embodiments, the exogeneous polynucleotide is about 8 kb nucleotides long. In some embodiments, the exogeneous polynucleotide is about 9 kb nucleotides long. In some embodiments, the exogeneous polynucleotide is about 10 kb nucleotides long.

[0169] In some embodiments, the exogeneous polynucleotide is an antigen or an antigenic epitope thereof. In some embodiments, the antigen or an antigenic epitope thereof is disease associated. In specific embodiments, the antigen or an antigenic epitope thereof is from a pathogen.

[0170] In some embodiments, the pathogen is a virus. In specific embodiments, the virus is a human SARS coronavirus, an influenza A virus, an influenza B virus, an influenza C virus an ebolavirus, a hepatitis B virus, a hepatitis C virus, a herpes simplex virus, a human immunodeficiency virus (HIV), a human papillomavirus (HPV-6, HPV-11), a measles virus, a rabies virus, a poliovirus, or a yellow fever virus.

[0171] In some embodiments, the pathogen is a bacterium. In specific embodiments, the bacteria are Acinetobacter baumanii, Aggregatobacter actinomycetemcomitans, Bartonella bacilliformis, Bartonella. henselae, Bartonella quintana, Bifidobacterium Borrelia, Bortadella pertussis, Brucella sp, Burkholderia cepacis, Burkholderia psedomallei, Campylobacter jejuni, Cardiobacterium hominis, Campylobacter fetus, Chlamydia pneumonia, Chlymydia trahomatis, Clostridium difficile, Cyanobacteria, Eikennella corrodens, Enterobacter, Enterococcus faccium, Escherichia coli, Escherichia coli 0157, Franceilla tularensis, Fusobacterium nucleatum, Haemophilus influenza, Haemophilus aphrophilus, Haemophilus ducreyi, Haemophilus parainfluenzae, Helicobacter pylori, Kingella kingae, Klebsiella pneumonia, Legionella bacteria, Legionella pneumophila serogroup 1, Leptospria, Morganella morganii, Neisseria gonorrhoeae, Neisseria meningitidis, Proteus mirabilis, Proteus vulgaris, Proteus myxofaciens, Providencia rettgeri, Providencia alcalifaciens, Providencia stuartii, Pseudomonas aeruginosa, Pseudomonas paucimobilis, Pseudomonas putida, Pseudomonas fluorescens, Pseudomonas acidovorans, Rickettsiae, Salmonella enterica, Salmonella typhi, Salmonella paratyphi types A, B typhus, Salmonella. dublin, Salmonella arizonae, Salmonella choleraesuis, Serratia marcescens, Schigella dysenteriae, Schigella flexneri, Schigella boydii, Schigella sonnei, Treponema, Stenotrophomonas maltophilia, Vibrio cholerae, Vibrio mimicus, Vibrio alginolyticus, Vibrio hollisae, Vibrio parahaemolyticus, Vibrio vulnificus, Yersinia pestitis, Actinomycetes, Bacillus anthracis, Bacillus subtilis, Clostridium tetani, Clostridium. perfingens, Clostridium botulinum, Clostridium tetani. Corynebacterium diphtheriae, Enterococcus faecalis, Enterococcus faecium, Erysipelothrix ruhsiopathiae, Listeria monocytogenes, Mycobacterium leprae, Mycobacterium tuberculosis, Mycoplasma, Nocardia, Propionibacerium, Pseudomonas aeruginosa, Pneumococci, Staphylococcus aureus, Staphylococcus epidermidis, methicillin resistant Staphylococcus aureus (MRSA), vancomycin resistant Staphylococcus aureus (VRSA), Staphylococcus lugdunensis, Staphylococcus saprophyticus, Streptococcus pneumonia, Streptococcus pyogenes, or Streptococcus mutants.

[0172] In some embodiments, the pathogen is a fungus, an amoeba, or a parasite. In specific embodiments, the fungus, the amoeba, or the parasite is Acanthamoeba spp, American tryppanosomiasis, Balamuthia mandnillanis, Babesia divergenes, Babesia bigemina, Babesia equi, Babesia microfti, Babesia duncani, Balantidium coli, Blastocystis spp Cryptosporidium spp, Cyclospora cayetanensis, dientamoeba fragilis, Diphyllobothrium latum, Leishmania amazonesis, Naegleria fowderi, Plasmodium falciparum, Plasmodium vivax, Plasmodium ovale curtisi, Plasmodium malariae, Rhinosporidium seeberi, Sarcocystis bovihominis, Sarcocystiss suihominis, Toxoplasma gondii, Trichmonas vaginalis, Trypanosoma brucei, Trypanosoma cruzi, and Taenia multiceps.

[0173] In some embodiments, the exogeneous polynucleotide encodes a gene editing tool. In specific embodiments, the gene editing tool is selected from a group consisting of meganuclease associated agents, CRISPR associated agents, TALEN associated agents, and zinc finger associated agents.

[0174] In some embodiments, the exogeneous polynucleotide is a small interfering RNA (siRNA), antisense RNA, micro RNA (miRNA), small or short hairpin RNA (shRNA), guide RNA (gRNA), clustered regularly interspaced short palindromic repeat RNA (crRNA), trans-activating clustered regularly interspaced short palindromic repeat RNA (tracrRNA), immune-stimulating oligonucleotide, antisense nucleic acid, or ribozyme. In specific embodiments, the exogeneous polynucleotide targets beta-secretase 1 (BACE1) and/or amyloid precursor protein (APP).

[0175] In some embodiments, the exogeneous polynucleotide encodes a polypeptide associated with a genetic disorder. In specific embodiments, the polypeptide is brain-derived neurotrophin factor (BDNF), nerve growth factor (NGF), Neprilysin inhibitors (NEP), endothelin converting enzyme (ECE), cathepsin B (CTSB), apolipoprotein E 2 (APOE2), SH3 and multiple ankyrin repeat domains protein (SHANK), neurturin (NRTN), glial cell-derived neurotrophic factor (GDNF), cerebral dopamine neurotrophic factor (CDNF), vascular endothelial growth factor A (VEGF-A), or aromatic L-amino acid decarboxylase (AADC).

[0176] In some embodiments, the exogeneous polynucleotide encodes a therapeutic agent or a diagnostic agent. In specific embodiments, the therapeutic agent is an antibody-based therapeutic agent, a hormone, a cytokine, an inhibitor or antagonist of an immune checkpoint regulator, an immune stimulatory molecule, or an agonist of an immune co-stimulatory molecule. In further embodiments, the inhibitor or antagonist of an immune checkpoint regulator is an anti-PD1 antibody. In another embodiments, the antibody-based therapeutic agent is an antibody, a functional fragment of an antibody, a chimeric antigen receptor (CAR), or a T cell receptor (TCR). In still other embodiments, the cytokine comprises lymphokine, monokine, polypeptide hormone, growth hormone, parathyroid hormone, thyroxine, insulin, proinsulin, relaxin, prorelaxin, glycoprotein hormone, follicle stimulating hormone (FSH), thyroid stimulating hormone (TSH), luteinizing hormone (LH), hepatic growth factor, fibroblast growth factor, prolactin, placental lactogen, tumor necrosis factor-a and -β, mullerian-inhibiting substance, mouse gonadotropin-associated peptide, inhibin, activin, vascular endothelial growth factor, integrin, thrombopoietin (TPO), nerve growth factor, NGF-β, platelet growth factor, transforming growth factor (TGF), TGF-a, TGF-β, insulin-like growth factor-I and -II, erythropoietin (EPO), osteoinductive factor, interferon, such as interferon-a, -β and -γ, colony stimulating factor (CSF), macrophage-CSF (M-CSF), granulocyte-macrophage-CSF (GM-CSF), granulocyte-CSF (GCSF), interleukin (IL), tumor necrosis factor, TNF-a, TNF-β, LIF, or kit ligand (KL), or a combination of two or more thereof.

### Additional Example Features

[0177] In some embodiments, components of the nucleic acid composition are expressed on one nucleic acid, or two or more separate nucleic acids. In some embodiments, the nucleic acid composition further comprises one or more expression control elements in operable linkage that confers expression of the nucleic acid composition in vitro or in vivo. In some embodiments, the expression control element is a promoter that drives expression of the nucleic acid complex in vitro. In specific embodiments, the promoter is T7, T3, SP6 or any phage promoter.

[0178] In some embodiments, the expression control element is a promoter that drives expression of the nucleic acid complex in a target cell. In some specific embodiments, the promoter is CMV, SV40 or any eukaryotic promoter.

[0179] In some embodiments, the target cell is a neuron, or a non-neuron cell, VERO, COS, CHO, C6/36, HeLa, HEK, or HepG2. In some embodiments, the target cell is an oligodendrocyte, microglia, or astrocyte.

[0180] In some embodiments, provided herein is a pharmaceutical composition comprising the nucleic acid composition described above with a pharmaceutically acceptable salt or derivative thereof.

### A Recombinant Zika Virus or a Zika-Virus-Like Particle

[0181] Viral vectors are widely used in fields such as gene therapy. Currently, the three key vectors are based on adenoviruses, adeno-associated viruses, and lentiviruses. However, limitations for each vectors exist. Provided herein is a recombinant zika virus or a zika-virus-like particle which in some embodiments provides more flexible packaging strategies, similar or better delivery efficiency, decreased insertional mutagenesis, decreased immune response, safety, or special tropism, or any combination thereof.

[0182] In some embodiments, the recombinant zika virus or the zika-virus-like particle is generated from expressing the nucleic acid composition described herein in a producer cell, wherein the producer cell is further infected by a second zika virus, so that the zika virus C or the derivative of the zika virus C, the zika virus prM/M or the derivative of the zika virus prM/M, and the zika virus E or the derivative of the zika virus E are present in the recombinant zika virus or the zika-virus-like particle.

[0183] In specific embodiments, the recombinant zika virus or a zika-virus-like particle is produced from a nucleic acid composition comprising a polynucleotide encoding a zika virus C or the derivative of the zika virus C only. In further specific embodiments, the recombinant zika virus or a zika-virus-like particle is produced from a nucleic acid composition that does not encode a zika virus C or derivative of zika virus C, does not encode a zika virus prM/M or derivative of zika virus prM/M, or does not encode a zika virus E or derivative of zika virus E, or any combination of two or more thereof. Accordingly, in some embodiments the recombinant zika virus described herein is generated from expressing such nucleic acid composition in a producer cell, wherein the producer cell is further infected by a second zika virus, so that the zika virus C or the derivative of the zika virus C, the zika virus prM/M or the derivative of the zika virus prM/M, and the zika virus E or the derivative of the zika virus E are present in the recombinant zika virus or the zika-virus-like particle.

[0184] In specific embodiments, the recombinant zika virus or a zika-virus-like particle is produced from a nucleic acid composition comprising a polynucleotide encoding a zika virus prM/M or the derivative of the zika virus prM/M only. Accordingly, in some embodiments the recombinant zika virus described herein is generated from expressing such nucleic acid composition in a producer cell, wherein the producer cell is further infected by a second zika virus, so that the zika virus C or the derivative of the zika virus C, the zika virus prM/M or the derivative of the zika virus prM/M, and the zika virus E or the derivative of the zika virus E are present in the recombinant zika virus or the zika-virus-like particle.

[0185] In specific embodiments, the recombinant zika virus or a zika-virus-like particle is produced from a nucleic acid composition comprising a polynucleotide encoding a zika virus viral E or the derivative of the zika virus E only. Accordingly, in some embodiments the recombinant zika virus described herein is generated from expressing such nucleic acid composition in a producer cell, wherein the producer cell is further infected by a second zika virus, so that the zika virus C or the derivative of the zika virus C, the zika virus prM/M or the derivative of the zika virus prM/M, and the zika virus E or the derivative of the zika virus E are present in the recombinant zika virus or the zika-virus-like particle.

[0186] In specific embodiments, the recombinant zika virus or a zika-virus-like particle is produced from a nucleic acid composition comprising a polynucleotide encoding a zika virus C or the derivative of the zika virus C and a polynucleotide encoding a zika virus prM/M or the derivative of the zika virus prM/M only. Accordingly, in some embodiments the recombinant zika virus described herein is generated from expressing such nucleic acid composition in a producer cell, wherein the producer cell is further infected by a second zika virus, so that the zika virus C or the derivative of the zika virus C, the zika virus prM/M or the derivative of the zika virus prM/M, and the zika virus E or the derivative of the zika virus E are present in the recombinant zika virus or the zika-virus-like particle.

[0187] In specific embodiments, the recombinant zika virus or a zika-virus-like particle is produced from a nucleic acid composition comprising a polynucleotide encoding a zika virus C or the derivative of the zika virus C and a polynucleotide encoding a zika virus viral E or the derivative of the zika virus E only. Accordingly, in some embodiments the recombinant zika virus described herein is generated from expressing such nucleic acid composition in a producer cell, wherein the producer cell is further infected by a second zika virus, so that the zika virus C or the derivative of the zika virus C, the zika virus prM/M or the derivative of the zika virus prM/M, and the zika virus E or the derivative of the zika virus E are present in the recombinant zika virus or the zika-virus-like particle.

[0188] In specific embodiments, the recombinant zika virus or a zika-virus-like particle is produced from a nucleic acid composition comprising a polynucleotide encoding a zika virus prM/M or the derivative of the zika virus prM/M and a polynucleotide encoding a zika virus viral E or the derivative of the zika virus E only. Accordingly, in some embodiments the recombinant zika virus described herein is generated from expressing such nucleic acid composition in a producer cell, wherein the producer cell is further infected by a second zika virus, so that the zika virus C or the derivative of the zika virus C, the zika virus prM/M or the derivative of the zika virus prM/M, and the zika virus E or the derivative of the zika virus E are present in the recombinant zika virus or the zika-virus-like particle.

[0189] In some embodiments, the second zika virus used in the further infection is a wild-type zika virus. In some embodiments, the wild-type zika virus is an African, an Asian and a Brazilian strain. In other embodiments, the second zika virus used in the further infection is a modified zika virus. In some specific embodiments, the modified zika virus comprises one or more microRNA-based gene-silencing machineries. In some specific embodiments, the one or more microRNA-based gene-silencing machineries control viral replication.

[0190] In some embodiments, the recombinant zika virus or the zika-virus-like particle is generated from expressing the nucleic acid described herein in a producer cell, without an infection of a second zika virus, wherein the zika virus C or the derivative of the zika virus C, the zika virus prM/M or the derivative of the zika virus prM/M, and the zika virus E or the derivative of the zika virus E are present in the recombinant zika virus or the zika-virus-like particle.

[0191] In some embodiment, the producer cell is a Vero E6, HEK, HEK 293T, HEK 293TT, FreeStyle™ 293-F Cell, HEK-293.2sus or C6/36 cell.

[0192] In some embodiments, the recombinant zika virus is replication competent. In other embodiments, the recombinant zika virus is replication incompetent without lowering the vector titer or impairing expression of the exogeneous polynucleotide. In some embodiments, the recombinant zika virus or the zika-virus-like particle has decreased insertional mutagenesis. In some embodiments, the recombinant zika virus or the zika-virus-like particle has decreased immune response. In some embodiments, the zika virus or the zika-virus-like particle has tropism for a cell of the central nervous system.

### Methods Related to the Recombinant Zika Virus or the Zika-Virus-Like Particle Comprising Three Structural Zika Proteins

[0193] In another aspect, provided herein is a method of delivering an exogeneous polynucleotide to a target cell, the method comprising applying to the target cell the recombinant zika virus or the zika-virus-like particle described herein comprising the exogeneous polynucleotide.

[0194] In some embodiments, the target cell is a neuron or a non-neuron cell. In specific embodiments, the neuron is an oligodendrocyte, microglia, or astrocyte. In another specific embodiments, the non-neuron cell is a prostate epithelial cell, a urethra epithelial cell, a Sertoli cell, a Leydig cell, a spermatogonium cell or a retinal cell.

[0195] In some embodiments, the method is carried out in vitro, ex vivo, or in vivo.

[0196] In some embodiments, the target cell transiently expresses the exogeneous polynucleotide after delivery. In other embodiments, the target cell persistently expresses the exogeneous polynucleotide after delivery.

[0197] In another aspect, provided herein is a method of treating Alzheimer's disease in a subject in need thereof, and the method comprises administering to the subject an effective amount of the recombinant zika virus or the zika-virus-like particle as described herein comprising a polynucleotide encoding a brain-derived neurotrophin factor (BDNF).

[0198] In another aspect, provided herein is a method of treating Alzheimer's disease in a subject in need thereof, and the method comprises administering to the subject an effective amount of the recombinant zika virus or the zika-virus-like particle as described herein comprising a polynucleotide targeting beta-site amyloid precursor protein cleaving enzyme 1 (BACE1).

[0199] In another aspect, provided herein is a method of treating Alzheimer's disease in a subject in need thereof, and the method comprises administering to the subject an effective amount of the recombinant zika virus or the zika-virus-like particle as described herein comprising a polynucleotide targeting amyloid precursor protein (APP).

[0200] In another aspect, provided herein is a method of treating Alzheimer's disease in a subject in need thereof, and the method comprises administering to the subject an effective amount of the recombinant zika virus or the zika-virus-like particle as described herein comprising a polynucleotide targeting Tau.

[0201] In another aspect, provided herein is a method of treating autism in a subject in need thereof, and the method comprises administering to the subject an effective amount of the recombinant zika virus or the zika-virus-like particle as described herein comprising a polynucleotide encoding SH3 and multiple ankyrin repeat domains protein (SHANK).

[0202] In yet another aspect, provided herein is a method of treating Parkinson's disease in a subject in need thereof, the method comprising administering the subject an effective amount of the recombinant zika virus or the zika-virus-like particle as described herein comprising a polynucleotide encoding aromatic L-amino acid decarboxylase (AADC).

[0203] In another aspect, provided herein is a method of treating Parkinson's disease in a subject in need thereof, and the method comprises administering to the subject an effective amount of the recombinant zika virus or the zika-virus-like particle as described herein comprising a polynucleotide encoding a human aromatic L-amino acid decarboxylase.

[0204] In another aspect, provided herein is a method of treating Parkinson's disease in a subject in need thereof, and the method comprises administering to the subject an effective amount of the recombinant zika virus or the zika-virus-like particle as described herein comprising a polynucleotide encoding glial cell line-derived neurotrophic factor.

[0205] In another aspect, provided herein is a method of treating/managing Down's Syndrome in a subject in need thereof, and the method comprises administering to the subject an effective amount of the recombinant zika virus or the zika-virus-like particle as described herein comprising a polynucleotide targets the additional copy of HSA21.

[0206] In another aspect, provided herein is a method of treating choroideremia-blindness in a subject in need thereof, and the method comprises administering to the subject an effective amount of the recombinant zika virus or the zika-virus-like particle as described herein comprising a polynucleotide encoding rab-escort protein 1 (REP1).

[0207] In another aspect, provided herein is a method of treating leber congenital amaurosis in a subject in need thereof, and the method comprises administering to the subject an effective amount of the recombinant zika virus or the zika-virus-like particle as described herein comprising a polynucleotide encoding an RPE65.

[0208] In another aspect, provided herein is a method of treating Parkinson's disease in a subject in need thereof, and the method comprises administering to the subject an effective amount of the recombinant zika virus or the zika-virus-like particle as described herein comprising a polynucleotide encoding a glutamic acid decarboxylase.

[0209] In another aspect, provided herein is a method of treating ornithine transcarbamylase (OTC) deficiency in a subject in need thereof, and the method comprises administering to the subject an effective amount of the recombinant zika virus or the zika-virus-like particle as described herein comprising a polynucleotide encoding ornithine transcarbamylase.

[0210] In another aspect, provided herein is a method of treating multiple sclerosis in a subject in need thereof, and the method comprises administering to the subject an effective amount of the recombinant zika virus or the zika-virus-like particle as described herein comprising a polynucleotide encoding an interferon-beta-1a and 1b.

[0211] In another aspect, provided herein is a method of treating Pompe Disease in a subject in need thereof, and the method comprises administering to the subject an effective amount of the recombinant zika virus or the zika-virus-like particle as described herein comprising a polynucleotide encoding an acid alpha-glucosidase.

[0212] In another aspect, provided herein is a method of treating depression in a subject in need thereof, and the method comprises administering to the subject an effective amount of the recombinant zika virus or the zika-virus-like particle as described herein comprising a polynucleotide encoding a selective serotonin reuptake inhibitor.

[0213] In some embodiments, the administrating is via systemic delivery.

[0214] In some embodiments, the administrating is performed intravenously and/or intratumorly.

[0215] In some embodiments, the administrating targets the cerebral spinal fluid in intracerebroventricular, cisterna magna, subpial, and/or intrathecal. In other embodiments, the administrating is not performed intraparenchymally.

### Dosing and Treatment Regimens

[0216] Administration frequencies for a pharmaceutical composition comprising the recombinant zika virus or the zika-virus-like particle provided herein may vary based on the method being practiced, the physical characteristics of the subject, the severity of the cancer, cancer type, and the formulation and the means used to administer the composition.

[0217] The duration of treatment will be based on the condition being treated and may be determined by the attending physician. The duration of administration, in many instances, varies depending on a number of factors. Exemplary factors include, without limitation, patient response, severity of symptoms, and cancer type. Under some conditions, treatment is continued for a number of days, weeks, or months. Under other conditions, complete treatment is achieve through administering one, two or three dose of the pharmaceutical composition over the entire course of treatment. In certain aspects, complete treatment can be achieved using a single dose of the pharmaceutical composition.

[0218] In certain embodiments wherein a patient's status does improve, the dose of the recombinant zika virus or the zika-virus-like particle or pharmaceutical composition thereof described herein being administered may be temporarily reduced or temporarily suspended for a certain length of time (i.e. a “drug holiday”).

[0219] In certain embodiments the dose of the composition being administered is temporarily reduced or temporarily suspended for a certain length of time (i.e. a “drug diversion”).

[0220] In some embodiments, once improvement of the patient's conditions has occurred, a maintenance dose is administered if necessary. Subsequently, in certain embodiments, the dosage or the frequency of administration, or both, is reduced, as a function of the symptoms, to a level at which the improved disease, disorder or condition is retained. In certain embodiments, however, the patient requires intermittent treatment on a long-term basis upon any recurrence of symptoms.

[0221] The amount of the recombinant zika virus or the zika-virus-like particle provided herein varies depending upon factors such as the particular virus, disease condition and its severity, the identity (e.g., weight, sex) of the subject in need of treatment, but can nevertheless be determined according to the particular circumstances surrounding the case. In some embodiments, the desired dose is conveniently presented in a single dose or in divided doses administered simultaneously (or over a short period of time) or at appropriate intervals, for example as two, three, four or more sub-doses per day.

[0222] In some embodiments, administration of the recombinant zika virus or the zika-virus-like particle provided herein depending on the titer, and the titer of the recombinant zika virus or the zika-virus-like particle is about 10⁶ PFU/mL to about 10¹⁰ PFU/mL.

[0223] In some embodiments, amount of the recombinant zika virus or the zika-virus-like particle of this disclosure, administered to a subject can be between about 10³ and 10¹² infectious viral particles or plaque forming units (PFU).

[0224] In some embodiments, the recombinant zika virus or the zika-virus-like particle of this disclosure can be administered at a dose that can comprise about 10³ viral particles/dose to about 10¹⁴ viral particles/dose.

[0225] In some embodiments, the recombinant zika virus or the zika-virus-like particle of this disclosure can be administered at a dose that can comprise about 10³ PFU/kg to about 10¹⁴ PFU/kg.

[0226] In some embodiments, the recombinant zika virus or the zika-virus-like particle of this disclosure can be administered at a dose that can comprise about 10³ viral particles/kg to about 10¹⁴ viral particles/kg.

### Pharmaceutical Compositions and Formulations of the Recombinant Zika Virus or the Zika-Virus-Like Particle

[0227] Provided herein are recombinant zika viruses or zika-virus-like particles formulated into pharmaceutical compositions.

[0228] Pharmaceutical compositions are formulated in a conventional manner using one or more pharmaceutically acceptable inactive ingredients that facilitate processing of the active agent into preparations that can be used pharmaceutically. A summary of pharmaceutical compositions described herein can be found, for example, in Remington: The Science and Practice of Pharmacy, Nineteenth Ed (Easton, Pa.: Mack Publishing Company, 1995); Hoover, John E., Remington's Pharmaceutical Sciences, Mack Publishing Co., Easton, Pennsylvania 1975; Liberman, H. A. and Lachman, L., Eds., Pharmaceutical Dosage Forms, Marcel Decker, New York, N.Y., 1980; and Pharmaceutical Dosage Forms and Drug Delivery Systems, Seventh Ed. (Lippincott Williams & Wilkins, 1999), herein incorporated by reference for such disclosure. For some virus delivery methods, a pharmaceutically acceptable vehicle is selected from known pharmaceutically acceptable vehicles for delivery, and should be one in which the virus is stable.

[0229] Further provided herein are pharmaceutical compositions that include a virus; a pharmaceutically acceptable inactive ingredient; other medicinal or pharmaceutical agent; carrier; adjuvant; preserving, stabilizing, wetting or emulsifying agent; solution promoter; salt; buffer; excipients; binder; filling agent; suspending agent; flavoring agent; sweetening agents; disintegrating agent; dispersing agent; surfactants; lubricant; colorant; diluent; solubilizer; moistening agent; plasticizers; penetration enhancer; anti-foam agent; antioxidant; preservative; or a combination thereof.

[0230] Another aspect of the present disclosure provides a pharmaceutical composition comprising a recombinant zika virus as described herein. In some embodiments, the pharmaceutical composition can comprise a solubilizing agent and an excipient. In some embodiments, the excipient can comprise one or more of a buffering agent, a stabilizer, an antioxidant, a binder, a diluent, a dispersing agent, a rate controlling agent, a lubricant, a glidant, a disintegrant, a plasticizer, a preservative, or any combinations thereof. In some embodiments, the excipient can comprise di-sodium hydrogen phosphate dihydrate, sodium dihydrogen phosphate dihydrate, sodium chloride, myo-inositol, sorbitol, or any combinations thereof. In some embodiments, the pharmaceutical composition does not comprise a preservative. In some embodiments, the pharmaceutical composition can comprise one or more of a preservative, a diluent, and a carrier. In some embodiments, the pharmaceutical composition can comprise an additional active ingredient or a salt thereof. In some embodiments, the solubilizing agent can be sterile water. In some embodiments, the pharmaceutical composition can comprise an additional active ingredient, wherein the additional active ingredient can be a further oncolytic virus.

[0231] Another aspect of the present disclosure provides a method of enhancing therapeutic effect of an oncolytic virus upon systemic delivery of the virus to a subject, comprising a systemic administration of the recombinant zika virus or the zika-virus-like particle as disclosed herein, the recombinant zika virus or the zika-virus-like particle as described herein, or a pharmaceutical composition as disclosed herein.

[0232] Pharmaceutical compositions containing a modified virus, the recombinant zika virus or the zika-virus-like particle as described herein, can be prepared as solutions, dispersions in glycerol, liquid polyethylene glycols, in oils, in solid dosage forms, as inhalable dosage forms, as intranasal dosage forms, as liposomal formulations, dosage forms comprising nanoparticles, dosage forms comprising microparticles, polymeric dosage forms, or any combinations thereof. In some embodiments, a pharmaceutical composition as described herein can comprise a stabilizer and a buffer. In some embodiments, a pharmaceutical composition as described herein can comprise a solubilizer, such as sterile water, Tris-buffer. In some embodiments, a pharmaceutical composition as described herein can comprise an excipient. An excipient can be an excipient described in the Handbook of Pharmaceutical Excipients, American Pharmaceutical Association (1986). Non-limiting examples of suitable excipients can include a buffering agent, a preservative, a stabilizer, a binder, a compaction agent, a lubricant, a chelator, a dispersion enhancer, a disintegration agent, a flavoring agent, a sweetener, a coloring agent.

[0233] In some embodiments an excipient can be a buffering agent. In some embodiments an excipient can comprise a preservative. Non-limiting examples of suitable preservatives can include antioxidants and antimicrobials. In some embodiments a pharmaceutical composition as described herein can comprise a binder as an excipient. In some embodiments a pharmaceutical composition as described herein can comprise a lubricant as an excipient. In some embodiments a pharmaceutical formulation can comprise a dispersion enhancer as an excipient. In some embodiments a pharmaceutical composition as described herein can comprise a disintegrant as an excipient. In some instances, a pharmaceutical composition as described herein can comprise a chelator.

[0234] Also contemplated are combination products that include one or more recombinant zika virus or one or more zika-virus-like particle described herein.

[0235] Under ordinary conditions of storage and use, the pharmaceutical compositions as described herein can comprise a preservative to prevent the growth of microorganisms. In certain examples, the pharmaceutical compositions as described herein may not comprise a preservative. The pharmaceutical forms suitable for injectable use can include sterile aqueous solutions or dispersions and sterile powders for the extemporaneous preparation of sterile injectable solutions or dispersions. The prevention of the action of microorganisms can be brought about by various antibacterial and antifungal agents.

[0236] For parenteral administration in an aqueous solution, for example, the liquid dosage form can be suitably buffered if necessary and the liquid diluent rendered isotonic with sufficient saline or glucose. The liquid dosage forms are especially suitable for intravenous, intramuscular, subcutaneous, intratumoral, and intraperitoneal administration. In this connection, sterile aqueous media that can be employed will be known to those of skill in the art in light of the present disclosure. For example, one dosage may be dissolved in 1 mL to 20 mL of isotonic NaCl solution and either added to 100 mL to 1000 mL of a fluid, e.g., sodium-bicarbonate buffered saline, or injected at the proposed site of infusion.

[0237] In certain embodiments, sterile injectable solutions can be prepared by incorporating the recombinant zika virus or the zika-virus-like particle according to the present disclosure, the recombinant zika virus or the zika-virus-like particle as described herein or a pharmaceutical composition containing the same, in the required amount in the appropriate solvent with various of the other ingredients enumerated above, as required, followed by filtered sterilization. Generally, dispersions are prepared by incorporating the various sterilized active ingredients into a sterile vehicle which contains the basic dispersion medium and the required other ingredients from those enumerated above. The compositions disclosed herein may be formulated in a neutral or salt form. Upon formulation, the pharmaceutical compositions can be administered in a manner compatible with the dosage formulation and in such amount as is therapeutically effective.

[0238] In certain embodiments, a pharmaceutical composition of this disclosure can comprise an effective amount of a recombinant virus, disclosed herein, combined with a pharmaceutically acceptable carrier. “Pharmaceutically acceptable,” as used herein, includes any carrier which does not interfere with the effectiveness of the biological activity of the active ingredients and/or that is not toxic to the patient to whom it is administered. Non-limiting examples of suitable pharmaceutical carriers include phosphate buffered saline solutions, water, emulsions, such as oil/water emulsions, various types of wetting agents and sterile solutions. Additional non-limiting examples of pharmaceutically compatible carriers can include gels, bioadsorbable matrix materials, implantation elements containing the recombinant zika virus or the zika-virus-like particle or any other suitable vehicle, delivery or dispensing means or material. Such carriers can be formulated by conventional methods and can be administered to the subject at an effective amount.

### Kits of the Recombinant Zika Virus or the Zika-Virus-Like Particle

[0239] In one aspect of the disclosure, provided herein are kits which include one or more reagents or devices for the performance of the methods disclosed herein. In some embodiments, the kit comprises the recombinant zika virus or the zika-virus-like particle provided herein. In some embodiments, the kit comprises a means to administrate the recombinant zika virus or the zika-virus-like particle provided herein.

[0240] In some embodiments, the kit comprises suitable instructions in order to perform the methods of the kit. The instructions may provide information of performing any of the methods disclosed herein, whether or not the methods may be performed using only the reagents provided in the kit. The kit and instructions may require additional reagents or systems.

[0241] For use in the therapeutic applications described herein, kits and articles of manufacture are also described herein. In some embodiments, such kits include a carrier, package, or container that is compartmentalized to receive one or more containers such as vials, tubes, and the like, each of the container(s) including one of the separate elements to be used in a method described herein. Suitable containers include, for example, bottles, vials, syringes, and test tubes. The containers can be formed from a variety of materials such as glass or plastic. The articles of manufacture provided herein contain packaging materials. Examples of pharmaceutical packaging materials include, but are not limited to, blister packs, bottles, tubes, inhalers, pumps, bags, vials, containers, syringes, bottles, and any packaging material suitable for a selected formulation and intended mode of administration and treatment. The container(s) optionally have a sterile access port (for example the container is an intravenous solution bag or a vial having a stopper pierceable by a hypodermic injection needle). Such kits optionally comprise a composition with an identifying description or label or instructions relating to its use in the methods described herein.

[0242] A kit will typically include one or more additional containers, each with one or more of various materials (such as reagents, optionally in concentrated form, and/or devices) desirable from a commercial and user standpoint for use of the recombinant zika virus or the zika-virus-like particle described herein. Non-limiting examples of such materials include, but not limited to, buffers, diluents, filters, needles, syringes, carrier, package, container, vial and/or tube labels listing contents and/or instructions for use, and package inserts with instructions for use. A set of instructions will also typically be included.

[0243] In some embodiments, a label is on or associated with the container. A label can be on a container when letters, numbers or other characters forming the label are attached, molded or etched into the container itself; a label can be associated with a container when it is present within a receptacle or carrier that also holds the container, e.g., as a package insert. A label can be used to indicate that the contents are to be used for a specific therapeutic application. The label can also indicate directions for use of the contents, such as in the methods described herein.

[0244] In certain embodiments, a pharmaceutical composition comprising the recombinant zika virus or the zika-virus-like particle provided herein and optional additional active agent is presented in a pack or dispenser device which can contain one or more unit dosage forms. The pack can for example contain metal or plastic foil, such as a blister pack. The pack or dispenser device can be accompanied by instructions for administration. The pack or dispenser can also be accompanied with a notice associated with the container in form prescribed by a governmental agency regulating the manufacture, use, or sale of pharmaceuticals, which notice is reflective of approval by the agency of the form of the drug for human or veterinary administration. Such notice, for example, can be the labeling approved by the U.S. Food and Drug Administration for prescription drugs, or the approved product insert. Compositions containing the recombinant zika virus or the zika-virus-like particle described herein formulated in a compatible pharmaceutical carrier can also be prepared, placed in an appropriate container, and labeled for treatment of an indicated condition.

### Nucleic Acid Composition Comprising Regulatory Regions of Zika Genome

[0245] A wild type zika genome comprises several regulatory regions, such as 5′ UTR and 3′ UTR. UTRs are found to be important in viral replication and immune modulation. Elements in UTRs are found to be essential for genome cyclization, resulting in initiation of RNA synthesis.

[0246] Ribozymes are self-cleaving RNAs. Small ribozyme motifs mainly fall within four types: hammerhead, hairpin, Varkud satellite (VS), and hepatitis delta virus (HDV).

[0247] In some embodiments, a nucleic acid composition described herein comprises a polynucleotide encoding a ribozyme. In some embodiments, a zika virus or zika-virus-like particle described herein comprises a ribozyme.

[0248] In one aspect, provided herein is a nucleic acid composition comprising (i) a polynucleotide encoding a ribozyme (ii) 5′untranslated region (UTR) of a zika virus; (iii) 3′UTR of the zika virus; and (iv) a polynucleotide exogenous to the zika virus. In some embodiments, the ribozyme is a hammerhead ribozyme or a HDV ribozyme. In some embodiments, the nucleic acid further comprises a polynucleotide encoding a second ribozyme. In some specific embodiments, the second ribozyme is a hammerhead ribozyme or a hepatitis delta virus (HDV) ribozyme. In some embodiments, the polynucleotide encoding the ribozyme encodes a hammerhead ribozyme and the polynucleotide encoding the second ribozyme encodes an HDV ribozyme. In some embodiments, the nucleic acid composition further comprises a C-partial.

[0249] In some embodiments, the zika virus is an African zika virus, an Asian zika virus, a Brazilian zika virus component, or a combination of one or two thereof. In specific embodiments, the zika virus is African MR766 strain.

### Exogenous Polynucleotides

[0250] In some embodiments, the exogeneous polynucleotide is an antigen or an antigenic epitope thereof. In some embodiments, the antigen or an antigenic epitope thereof is disease associated. In specific embodiments, the antigen or an antigenic epitope thereof is from a pathogen.

[0251] In some embodiments, the pathogen is a virus. In specific embodiments, the virus is a human SARS coronavirus, an influenza A virus, an influenza B virus, an influenza C virus an ebolavirus, a hepatitis B virus, a hepatitis C virus, a herpes simplex virus, a human immunodeficiency virus (HIV), a human papillomavirus (HPV-6, HPV-11), a measles virus, a rabies virus, a poliovirus, or a yellow fever virus.

[0252] In some embodiments, the pathogen is a bacteria. In specific embodiments, the bacteria is Acinetobacter baumanii, Aggregatobacter actinomycetemcomitans, Bartonella bacilliformis, Bartonella. henselae, Bartonella quintana, Bifidobacterium Borrelia, Bortadella pertussis, Brucella sp, Burkholderia cepacis, Burkholderia psedomallei, Campylobacter jejuni, Cardiobacterium hominis, Campylobacter fetus, Chlamydia pneumonia, Chlymydia trahomatis, Clostridium difficile, Cyanobacteria, Eikennella corrodens, Enterobacter, Enterococcus faccium, Escherichia coli, Escherichia coli 0157, Franceilla tularensis, Fusobacterium nucleatum, Haemophilus influenza, Haemophilus aphrophilus, Haemophilus ducreyi, Haemophilus parainfluenzae, Helicobacter pylori, Kingella kingae, Klebsiella pneumonia, Legionella bacteria, Legionella pneumophila serogroup 1, Leptospria, Morganella morganii, Neisseria gonorrhoeae, Neisseria meningitidis, Proteus mirabilis, Proteus vulgaris, Proteus myxofaciens, Providencia rettgeri, Providencia alcalifaciens, Providencia stuartii, Pseudomonas aeruginosa, Pseudomonas paucimobilis, Pseudomonas putida, Pseudomonas fluorescens, Pseudomonas acidovorans, Rickettsiae, Salmonella enterica, Salmonella typhi, Salmonella paratyphi types A, B typhus, Salmonella. dublin, Salmonella arizonae, Salmonella choleraesuis, Serratia marcescens, Schigella dysenteriae, Schigella flexneri, Schigella boydii, Schigella sonnei, Treponema, Stenotrophomonas maltophilia, Vibrio cholerae, Vibrio mimicus, Vibrio alginolyticus, Vibrio hollisae, Vibrio parahaemolyticus, Vibrio vulnificus, Yersinia pestitis, Actinomycetes, Bacillus anthracis, Bacillus subtilis, Clostridium tetani, Clostridium. perfingens, Clostridium botulinum, Clostridium tetani. Corynebacterium diphtheriae, Enterococcus faecalis, Enterococcus faecium, Erysipelothrix ruhsiopathiae, Listeria monocytogenes, Mycobacterium leprae, Mycobacterium tuberculosis, Mycoplasma, Nocardia, Propionibacerium, Pseudomonas aeruginosa, Pneumococci, Staphylococcus aureus, Staphylococcus epidermidis, methicillin resistant Staphylococcus aureus (MRSA), vancomycin resistant Staphylococcus aureus (VRSA), Staphylococcus lugdunensis, Staphylococcus saprophyticus, Streptococcus pneumonia, Streptococcus pyogenes, or Streptococcus mutants.

[0253] In some embodiments, the pathogen is a fungus, an amoeba, or a parasite. In specific embodiments, the fungus, the amoeba, or the parasite is Acanthamoeba spp, American tryppanosomiasis, Balamuthia mandnillanis, Babesia divergenes, Babesia bigemina, Babesia equi, Babesia microfti, Babesia duncani, Balantidium coli, Blastocystis spp Cryptosporidium spp, Cyclospora cayetanensis, dientamoeba fragilis, Diphyllobothrium latum, Leishmania amazonesis, Naegleria fowderi, Plasmodium falciparum, Plasmodium vivax, Plasmodium ovale curtisi, Plasmodium malariae, Rhinosporidium seeberi, Sarcocystis bovihominis, Sarcocystiss suihominis, Toxoplasma gondii, Trichmonas vaginalis, Trypanosoma brucei, Trypanosoma cruzi, and Taenia multiceps.

[0254] In some embodiments, the exogeneous polynucleotide encodes a gene editing tool. In specific embodiments, the gene editing tool is selected from a group consisting of meganuclease associated agents, CRISPR associated agents, TALEN associated agents, and zinc finger associated agents.

[0255] In some embodiments, the exogeneous polynucleotide is a small interfering RNA (siRNA), antisense RNA, micro RNA (miRNA), small or short hairpin RNA (shRNA), guide RNA (gRNA), clustered regularly interspaced short palindromic repeat RNA (crRNA), trans-activating clustered regularly interspaced short palindromic repeat RNA (tracrRNA), immune-stimulating oligonucleotide, antisense nucleic acid, or ribozyme. In specific embodiments, the exogeneous polynucleotide targets beta-secretase 1 (BACE1) and/or amyloid precursor protein (APP).

[0256] In some embodiments, the exogeneous polynucleotide encodes a polypeptide associated with a genetic disorder. In specific embodiments, the polypeptide is brain-derived neurotrophin factor (BDNF), nerve growth factor (NGF), Neprilysin inhibitors (NEP), endothelin converting enzyme (ECE), cathepsin B (CTSB), apolipoprotein E 2 (APOE2), SH3 and multiple ankyrin repeat domains protein (SHANK), neurturin (NRTN), glial cell-derived neurotrophic factor (GDNF), cerebral dopamine neurotrophic factor (CDNF), vascular endothelial growth factor A (VEGF-A), or aromatic L-amino acid decarboxylase (AADC).

[0257] In some embodiments, the exogeneous polynucleotide encodes a therapeutic agent or a diagnostic agent. In specific embodiments, the therapeutic agent is an antibody-based therapeutic agent, a hormone, a cytokine, an inhibitor or antagonist of an immune checkpoint regulator, an immune stimulatory molecule, or an agonist of an immune co-stimulatory molecule. In further embodiments, the inhibitor or antagonist of an immune checkpoint regulator is an anti-PD1 antibody. In another embodiments, the antibody-based therapeutic agent is an antibody, a functional fragment of an antibody, a chimeric antigen receptor (CAR), or a T cell receptor (TCR). In still other embodiments, the cytokine comprises lymphokine, monokine, polypeptide hormone, growth hormone, parathyroid hormone, thyroxine, insulin, proinsulin, relaxin, prorelaxin, glycoprotein hormone, follicle stimulating hormone (FSH), thyroid stimulating hormone (TSH), luteinizing hormone (LH), hepatic growth factor, fibroblast growth factor, prolactin, placental lactogen, tumor necrosis factor-a and -β, mullerian-inhibiting substance, mouse gonadotropin-associated peptide, inhibin, activin, vascular endothelial growth factor, integrin, thrombopoietin (TPO), nerve growth factor, NGF-β, platelet growth factor, transforming growth factor (TGF), TGF-a, TGF-β, insulin-like growth factor-I and -II, erythropoietin (EPO), osteoinductive factor, interferon, such as interferon-a, -β and -γ, colony stimulating factor (CSF), macrophage-CSF (M-CSF), granulocyte-macrophage-CSF (GM-CSF), granulocyte-CSF (GCSF), interleukin (IL), tumor necrosis factor, TNF-a, TNF-β, LIF, or kit ligand (KL), or a combination of two or more thereof.

[0258] In some embodiments, the exogeneous polynucleotide is about or up to about 10000, 9000, 8000, 7000, 6000, or 5000 nucleotides long. For example, the exogenous polynucleotide is about 50 to about 10000, 9000, 8000, 7000, 6000, or 5000 nucleotides long. The exogenous polynucleotide may be about 100 to about 10000, 9000, 8000, 7000, 6000, or 5000 nucleotides long. The exogenous polynucleotide may be about 50 to about 6000 nucleotides long. The exogenous polynucleotide may be about 100 to about 6000 nucleotides long. The exogenous polynucleotide may be about 50 to about 5000 nucleotides long. The exogenous polynucleotide may be about 100 to about 5000 nucleotides long.

[0259] In some embodiments, the exogeneous polynucleotide is about 0.1 kb nucleotides long. In other embodiments, the exogenous sequence is about 0.2 kb long. In other embodiments, the exogenous sequence is about 0.3 kb long. In other embodiments, the exogenous sequence is about 0.4 kb long. In other embodiments, the exogenous sequence is about 0.5 kb long. In other embodiments, the exogenous sequence is about 0.6 kb long. In other embodiments, the exogenous sequence is about 0.7 kb long. In other embodiments, the exogenous sequence is about 0.8 kb long. In other embodiments, the exogenous sequence is about 0.9 kb long. In other embodiments, the exogenous sequence is about 1 kb nucleotides long. In other embodiments, the exogeneous polynucleotide is about 2 kb nucleotides long. In some embodiments, the exogeneous polynucleotide is about 3 kb nucleotides long. In some embodiments, the exogeneous polynucleotide is about 4 kb nucleotides long. In some embodiments, the exogeneous polynucleotide is about 5 kb nucleotides long. In some embodiments, the exogeneous polynucleotide is about 6 kb nucleotides long. In some embodiments, the exogeneous polynucleotide is about 7 kb nucleotides long. In some embodiments, the exogeneous polynucleotide is about 8 kb nucleotides long. In some embodiments, the exogeneous polynucleotide is about 9 kb nucleotides long. In some embodiments, the exogeneous polynucleotide is about 10 kb nucleotides long. In some embodiments, the exogeneous polynucleotide is about 11 kb nucleotides long. In some embodiments, the exogeneous polynucleotide is about 12 kb nucleotides long. In some embodiments, the exogeneous polynucleotide is about 13 kb nucleotides long. In some embodiments, the exogeneous polynucleotide is about 14 kb nucleotides long. In some embodiments, the exogeneous polynucleotide is about 15 kb nucleotides long. In some embodiments, the exogeneous polynucleotide is about 16 kb nucleotides long. In some embodiments, the exogeneous polynucleotide is about 17 kb nucleotides long. In some embodiments, the exogeneous polynucleotide is about 18 kb nucleotides long. In some embodiments, the exogeneous polynucleotide is about 19 kb nucleotides long. In some embodiments, the exogeneous polynucleotide is about 20 kb nucleotides long.

### Other Features of Nucleic Acid Composition Comprising Regulatory Regions of Zika Genome

[0260] In some embodiments, the nucleic acid composition further comprises one or more expression control elements in operable linkage that confers expression of the nucleic acid composition in vitro. In some embodiments, the expression control element is a promoter that drives expression of the nucleic acid complex in vitro. In specific embodiments, the promoter is T7, T3, SP6 or any phage promoter.

[0261] In another aspect, provided herein is a pharmaceutical composition comprising the nucleic acid composition described herein with a pharmaceutically acceptable salt or derivative thereof.

### Method of Uses of Nucleic Acid Composition

[0262] In another aspect, provided herein is method of delivering an exogeneous polynucleotide to a target cell, the method comprising administering to the target cell a compound produced from a nucleic acid composition as described herein comprising the exogeneous polynucleotide.

[0263] In some embodiments, the compound is produced by encapsulating a transcript produced from the nucleic acid composition described herein with a lipid-based agent. In specific embodiments, the transcript is capless. In another specific embodiments, the transcript is produced by in vitro transcribing the nucleic acid composition.

[0264] In some embodiments, the lipid-based agent is a lipofectamine-related reagent, a liposome, or a lipid nanoparticle.

[0265] In some embodiments, the lipid-based agent described herein is a cationic lipid, a neutral lipid, and a polyethyleneglycol conjugate, such as a PEG-diacylglycerol, PEG-diacylglycamide, PEG-cholesterol, or PEG-DMB conjugate, cholesterol, or a cholesterol derivative.

[0266] Suitable cationic lipids include those cationic lipids which carry a net negative charge at a selected pH, such as physiological pH. Particularly useful cationic lipids include those having a relatively small head group, such as a tertiary amine, quaternary amine or guanidine head group, and sterically hindered asymmetric lipid chains. In any of the embodiments described herein, the cationic lipid can be N,N-dioleyl-N,N-dimethylammonium chloride (DODAC), N,N-distearyl-N,N-dimethylammonium bromide (DDAB), N-(1-(2,3-dioleoyloxy) propyl)-N,N,N-trimethylammonium chloride (DOTAP), N-(1-(2,3-dioleyloxy) propyl)-N,N,N-trimethylammonium chloride (DOTMA), N,N-dimethyl-2,3-dioleyloxy) propylamine (DODMA), 1,2-Dioleoyl-3-Dimethylammonium-propane (DODAP), 1,2-Dioleoylcarbamyl-3-Dimethylammonium-propane (DOCDAP), 1,2-Dilineoyl-3-Dimethylammonium-propane (DLINDAP), Dioleoyloxy-N-[2-sperminecarboxamido)ethyl}-N,N-dimethyl-1-propanaminiumtrifluoroacetate (DOSPA), Dioctadecylamidoglycyl spermine (DOGS), DC-Chol, 1,2-Dimyristyloxypropyl-3-dimethyl-hydroxyethyl ammonium bromide (DMRIE), 3-Dimethylamino-2-(Cholest-5-en-3-beta-oxybutan-4-oxy)-1-(cis,cis-9,12-octadecadienoxy) propane (CLinDMA), 2-[5′-(cholest-5-en-3β-oxy)-3′-oxapentoxy)-3-dimethyl-1-(cis, cis-9′,12′-octadecadienoxy) propane (CpLinDMA), N,N-Dimethyl-3,4-dioleyloxybenzylamine (DMOBA), 1,2-N,N′-Dioleylcarbamyl-3-dimethylaminopropane (DOcarbDAP), and/or a mixture thereof, as well as other cationic lipids sharing similar properties. The above cationic lipids can include various differing salts as are known in the art.

[0267] In some embodiments, the head group of the cationic lipid can be attached to the lipid chain via a cleavable or non-cleavable linker, such as a linker described herein or otherwise known in the art. Non-limiting examples of suitable linkers include those comprising a C1 to C10 alkyl, alkyl ether, polyether, polyethylene glycol, acetal, amide, carbonyl, carbamide, carbamate, carbonate, ester (i.e., monoester, diester), or succinyl.

[0268] Suitable neutral lipids include those comprising any of a variety of neutral uncharged, zwitterionic or anionic lipids capable of producing a stable complex. They are preferably neutral, although they can alternatively be positively or negatively charged. In any of the embodiments described herein, suitable neutral lipids include those selected from compounds having formulae NLI-NL VII, dioleoylphosphatidylethanolamine (DOPE), palmitoyloleoylphosphatidylcholine (POPC), egg phosphatidylcholine (EPC), distearoylphosphatidylcholine (DSPC), dioleoylphosphatidylcholine (DOPC), dipalmitoylphosphatidylcholine (DPPC), dioleoylphosphatidylglycerol (DOPG), dipalmitoylphosphatidylglycerol (DPPG),-phosphatidylet-hanolamine (POPE) and dioleoyl-phosphatidylethariolamine 4-(N-maleimidomethyl)-cyclohexane-1-carboxylate (DOPE-mal), cholesterol, as well as other neutral lipids described herein below, and/or a mixture thereof.

[0269] Suitable polyethyleneglycol-diacylglycerol or polyethyleneglycol-diacylglycamide (PEG-DAG) conjugates include those comprising a dialkylglycerol or dialkylglycamide group having alkyl chain length independently comprising from about C4 to about C40 saturated or unsaturated carbon atoms. The dialkylglycerol or dialkylglycamide group can further comprise one or more substituted alkyl groups. In any of the embodiments described herein, the PEG conjugate can be selected from PEG-dilaurylglycerol (C12), PEG-dimyristylglycerol (C14), PEG-dipalmitoylglycerol (C16), PEG-disterylglycerol (C18), PEG-dilaurylglycamide (C12), PEG-dimyristylglycamide (C14), PEG-dipalmitoylglycamide (C16), and PEG-disterylglycamide (C18), PEG-cholesterol (1-[8′-(Cholest-5-en-3β-oxy) carboxamido-3′,6′-dioxaoctanyl]carbamoyl-ω-methyl-poly(ethylene glycol), and PEG-DMB (3,4-Ditetradecoxylbenzyl-ω-methyl-poly(ethylene glycol) ether).

[0270] In another aspect, provided herein is a method of triggering or boosting an immune response in a subject, the method comprising administering to the subject an effective amount of a compound produced from the nucleic acid composition as described herein comprising an antigen or an antigenic epitope thereof.

[0271] In some embodiments, the compound is produced by encapsulating a transcript produced from the nucleic acid composition described herein with a lipid-based agent. In specific embodiments, the transcript is capless. In another specific embodiments, the transcript is produced by in vitro transcribing the nucleic acid composition.

[0272] In some embodiments, the lipid-based agent is a lipofectamine-related reagent, a liposome, or a lipid nanoparticle.

[0273] In some embodiments, the administrating is performed intramuscularly.

[0274] In some embodiments, the antigen or an antigenic epitope thereof is from a pathogen.

[0275] In some embodiments, the pathogen is a virus. In specific embodiments, the virus is a human SARS coronavirus, an influenza A virus, an influenza B virus, an influenza C virus an ebolavirus, a hepatitis B virus, a hepatitis C virus, a herpes simplex virus, a human immunodeficiency virus (HIV), a human papillomavirus (HPV-6, HPV-11), a measles virus, a rabies virus, a poliovirus, or a yellow fever virus.

[0276] In some embodiments, the pathogen is a bacteria. In specific embodiments, the bacteria is Acinetobacter baumanii, Aggregatobacter actinomycetemcomitans, Bartonella bacilliformis, Bartonella. henselae, Bartonella quintana, Bifidobacterium Borrelia, Bortadella pertussis, Brucella sp, Burkholderia cepacis, Burkholderia psedomallei, Campylobacter jejuni, Cardiobacterium hominis, Campylobacter fetus, Chlamydia pneumonia, Chlymydia trahomatis, Clostridium difficile, Cyanobacteria, Eikennella corrodens, Enterobacter, Enterococcus faccium, Escherichia coli, Escherichia coli 0157, Franceilla tularensis, Fusobacterium nucleatum, Haemophilus influenza, Haemophilus aphrophilus, Haemophilus ducreyi, Haemophilus parainfluenzae, Helicobacter pylori, Kingella kingae, Klebsiella pneumonia, Legionella bacteria, Legionella pneumophila serogroup 1, Leptospria, Morganella morganii, Neisseria gonorrhoeae, Neisseria meningitidis, Proteus mirabilis, Proteus vulgaris, Proteus myxofaciens, Providencia rettgeri, Providencia alcalifaciens, Providencia stuartii, Pseudomonas aeruginosa, Pseudomonas paucimobilis, Pseudomonas putida, Pseudomonas fluorescens, Pseudomonas acidovorans, Rickettsiae, Salmonella enterica, Salmonella typhi, Salmonella paratyphi types A, B typhus, Salmonella. dublin, Salmonella arizonae, Salmonella choleraesuis, Serratia marcescens, Schigella dysenteriae, Schigella flexneri, Schigella boydii, Schigella sonnei, Treponema, Stenotrophomonas maltophilia, Vibrio cholerae, Vibrio mimicus, Vibrio alginolyticus, Vibrio hollisae, Vibrio parahaemolyticus, Vibrio vulnificus, Yersinia pestitis, Actinomycetes, Bacillus anthracis, Bacillus subtilis, Clostridium tetani, Clostridium. perfingens, Clostridium botulinum, Clostridium tetani. Corynebacterium diphtheriae, Enterococcus faecalis, Enterococcus faecium, Erysipelothrix ruhsiopathiae, Listeria monocytogenes, Mycobacterium leprae, Mycobacterium tuberculosis, Mycoplasma, Nocardia, Propionibacerium, Pseudomonas aeruginosa, Pneumococci, Staphylococcus aureus, Staphylococcus epidermidis, methicillin resistant Staphylococcus aureus (MRSA), vancomycin resistant Staphylococcus aureus (VRSA), Staphylococcus lugdunensis, Staphylococcus saprophyticus, Streptococcus pneumonia, Streptococcus pyogenes, or Streptococcus mutants.

[0277] In some embodiments, the pathogen is a fungus, an amoeba, or a parasite. In specific embodiments, the fungus, the amoeba, or the parasite is Acanthamoeba spp, American tryppanosomiasis, Balamuthia mandnillanis, Babesia divergenes, Babesia bigemina, Babesia equi, Babesia microfti, Babesia duncani, Balantidium coli, Blastocystis spp Cryptosporidium spp, Cyclospora cayetanensis, dientamoeba fragilis, Diphyllobothrium latum, Leishmania amazonesis, Naegleria fowderi, Plasmodium falciparum, Plasmodium vivax, Plasmodium ovale curtisi, Plasmodium malariae, Rhinosporidium seeberi, Sarcocystis bovihominis, Sarcocystiss suihominis, Toxoplasma gondii, Trichmonas vaginalis, Trypanosoma brucei, Trypanosoma cruzi, and Taenia multiceps.

### Non-Limiting Example Embodiments

[0278] 1. A nucleic acid composition comprising (i) a polynucleotide encoding a zika virus 5′UTR or a derivative of the zika virus 5′ UTR, a polynucleotide encoding a zika virus 3′UTR or a derivative of the zika virus 3′ UTR, a polynucleotide encoding a zika virus capsid protein (C) or the derivative of the zika virus C, a polynucleotide encoding a zika virus viral membrane protein (prM/M) or the derivative of the zika virus prM/M, a polynucleotide encoding a zika virus viral envelope protein (E) or the derivative of the zika virus E, or any combination thereof; and (ii) a polynucleotide exogenous to the zika virus.

[0279] 2. The nucleic acid composition of embodiment 1, wherein the nucleic acid composition comprises the polynucleotide encoding the zika virus 5′UTR, the polynucleotide encoding the zika virus 3′UTR, the polynucleotide encoding the zika virus C or the derivative of the zika virus C, the polynucleotide encoding the zika virus prM/M or the derivative of the zika virus prM/M, and the polynucleotide encoding the zika virus E or the derivative of the zika virus E. 3. The nucleic acid composition of embodiment 1 or embodiment 2, wherein the polynucleotide encoding the zika virus 5′UTR or a derivative of the zika virus 5′UTR, the polynucleotide encoding the zika virus 3′UTR or a derivative of zika virus 3′UTR, the polynucleotide encoding the zika virus C or the derivative of the zika virus C, the polynucleotide encoding the zika virus prM/M or the derivative of the zika virus prM/M, and the polynucleotide encoding the zika virus E or the derivative of the zika virus E are expressed on one or two or more separate nucleic acids.

[0280] 4. The nucleic acid composition of the preceding embodiments, wherein the polynucleotide encoding the derivative of the zika virus 5′UTR comprises at least one substitution, at least one deletion, and/or at least one insertion as compared to a wild-type zika virus 5′UTR.

[0281] 5. The nucleic acid composition of the proceeding embodiments, wherein the zika virus 5′UTR or the derivative of the zika virus 5′UTR comprises an amino acid sequence at least 90%, 91%, 92%, 93%, 94%, 95%, 96%, 97%, 98%, 99%, or 100% identical to a sequence of Table 1A, Table 1C, Table 1H, or Table 2.

[0282] 6. The nucleic acid composition of the preceding embodiments, wherein the polynucleotide encoding the derivative of the zika virus 3′UTR comprises at least one substitution, at least one deletion, and/or at least one insertion as compared to a wild-type zika virus 3′UTR.

[0283] 7. The nucleic acid composition of the preceding embodiments, wherein the zika virus 3′UTR or the derivative of the zika virus 3′UTR comprises an amino acid sequence at least 90%, 91%, 92%, 93%, 94%, 95%, 96%, 97%, 98%, 99%, or 100% identical to a sequence of Table 1A, Table 1B, Table 1G, or Table 2.

[0284] 8 The nucleic acid composition of the preceding embodiments, wherein the polynucleotide encoding the derivative of the zika virus C comprises at least one substitution, at least one deletion, and/or at least one insertion as compared to a wild-type zika virus C.

[0285] 9. The nucleic acid composition of the preceding embodiments, wherein the zika virus C or the derivative of the zika virus C comprises an amino acid sequence at least 90%, 91%, 92%, 93%, 94%, 95%, 96%, 97%, 98%, 99%, or 100% identical to a sequence of Table 1A, Table 1D, Table 1I, Table 2, or Table 3.

[0286] 10. The nucleic acid composition of the preceding embodiments, wherein the polynucleotide encoding the derivative of the zika virus prM/M comprises at least one substitution, at least one deletion, and/or at least one insertion as compared to a wild-type zika virus prM/M.

[0287] 11. The nucleic acid composition of the preceding embodiments, wherein the zika virus prM/M or the derivative of the zika virus prM/M comprises a sequence at least 90%, 91%, 92%, 93%, 94%, 95%, 96%, 97%, 98%, 99%, or 100% identical to a sequence of Table 1A, Table 1F, or Table 1K.

[0288] 12. The nucleic acid composition of the preceding embodiments, wherein the polynucleotide encoding the derivative of the zika virus E comprises at least one substitution, at least one deletion, and/or at least one insertion as compared to a wild-type zika virus E.

[0289] 13. The nucleic acid composition of the preceding embodiments, wherein the polynucleotide encoding E is translated into a wild zika virus type E.

[0290] 14. The nucleic acid composition of the preceding embodiments, wherein the zika virus E or the derivative of the zika virus E comprises a sequence at least 90%, 91%, 92%, 93%, 94%, 95%, 96%, 97%, 98%, 99%, or 100% identical to sequence of Table 1A, Table IE, or Table 1J.

[0291] 15. The nucleic acid composition of the preceding embodiments, wherein the nucleic acid composition comprises the 5′ untranslated region (5′ UTR) of the zika virus.

[0292] 16. The nucleic acid composition of the preceding embodiments, wherein the nucleic acid composition comprises the 3′ untranslated region (3′ UTR) of the zika virus.

[0293] 17. The nucleic acid composition of the preceding embodiments, wherein the nucleic acid composition does not comprise a polynucleotide encoding one or more non-structural (NS) proteins selected from (i) a NS1, (ii) a NS2A, (iii) a NS2B, (iv) a NS3, (v) a NS4A, (vi) a NS4B, (vii) a NS5, or (viii) two or more of (i)-(vii).

[0294] 18. The nucleic acid composition of the preceding embodiments, wherein nucleic acid composition further comprises a polynucleotide encoding one or more non-structural (NS) proteins selected from (i) a NS1, (ii) a NS2A, (iii) a NS2B, (iv) a NS3, (v) a NS4A, (vi) a NS4B, (vii) a NS5, or (viii) two or more of (i)-(vii).

[0295] 19. The nucleic acid composition of embodiment 17 or embodiment 18, wherein the NS1 is a zika virus NS1, the NS2A is a zika virus NS2A, the NS2B is a zika virus NS2B, the NS3 is a zika virus NS3, the NS4A is a zika virus NS4A, the NS4B is a zika virus NS4B, or the NS5 is a zika virus NS5, or any combination of two or more thereof.

[0296] 20. The nucleic acid composition of the preceding embodiments, wherein the components of the nucleic acid composition comprise African zika virus components, Asian zika virus components, or Brazilian zika virus components, or a combination thereof.

[0297] 21. The nucleic acid composition of embodiment 20, wherein the zika virus is African MR766 strain.

[0298] 22. The nucleic acid composition of the preceding embodiments, wherein the exogeneous polynucleotide is an antigen or an antigenic epitope thereof.

[0299] 23. The nucleic acid composition of embodiment 22, wherein the antigen or an antigenic epitope thereof is disease associated.

[0300] 24. The nucleic acid composition of embodiment 23, wherein the antigen or an antigenic epitope thereof is from a pathogen.

[0301] 25. The nucleic acid composition of embodiment 24, wherein the pathogen is a virus.

[0302] 26. The nucleic acid composition of embodiment 25, wherein the virus is a human SARS coronavirus, an influenza A virus, an influenza B virus, an influenza C virus an ebolavirus, a hepatitis B virus, a hepatitis C virus, a herpes simplex virus, a human immunodeficiency virus (HIV), a human papillomavirus (HPV-6, HPV-11), a measles virus, a rabies virus, a poliovirus, or a yellow fever virus.

[0303] 27. The nucleic acid composition of embodiment 24, wherein the pathogen is a bacteria

[0304] 28. The nucleic acid composition of embodiment 27, wherein the bacteria is Acinetobacter baumanii, Aggregatobacter actinomycetemcomitans, Bartonella bacilliformis, Bartonella. henselae, Bartonella quintana, Bifidobacterium Borrelia, Bortadella pertussis, Brucella sp, Burkholderia cepacis, Burkholderia psedomallei, Campylobacter jejuni, Cardiobacterium hominis, Campylobacter fetus, Chlamydia pneumonia, Chlymydia trahomatis, Clostridium difficile, Cyanobacteria, Eikennella corrodens, Enterobacter, Enterococcus faccium, Escherichia coli, Escherichia coli 0157, Franceilla tularensis, Fusobacterium nucleatum, Haemophilus influenza, Haemophilus aphrophilus, Haemophilus ducreyi, Haemophilus parainfluenzae, Helicobacter pylori, Kingella kingae, Klebsiella pneumonia, Legionella bacteria, Legionella pneumophila serogroup 1, Leptospria, Morganella morganii, Neisseria gonorrhoeae, Neisseria meningitidis, Proteus mirabilis, Proteus vulgaris, Proteus myxofaciens, Providencia rettgeri, Providencia alcalifaciens, Providencia stuartii, Pseudomonas aeruginosa, Pseudomonas paucimobilis, Pseudomonas putida, Pseudomonas fluorescens, Pseudomonas acidovorans, Rickettsiae, Salmonella enterica, Salmonella typhi, Salmonella paratyphi types A, B typhus, Salmonella. dublin, Salmonella arizonae, Salmonella choleraesuis, Serratia marcescens, Schigella dysenteriae, Schigella flexneri, Schigella boydii, Schigella sonnei, Treponema, Stenotrophomonas maltophilia, Vibrio cholerae, Vibrio mimicus, Vibrio alginolyticus, Vibrio hollisae, Vibrio parahaemolyticus, Vibrio vulnificus, Yersinia pestitis, Actinomycetes, Bacillus anthracis, Bacillus subtilis, Clostridium tetani, Clostridium. perfingens, Clostridium botulinum, Clostridium tetani. Corynebacterium diphtheriae, Enterococcus faecalis, Enterococcus faecium, Erysipelothrix ruhsiopathiae, Listeria monocytogenes, Mycobacterium leprae, Mycobacterium tuberculosis, Mycoplasma, Nocardia, Propionibacerium, Pseudomonas aeruginosa, Pneumococci, Staphylococcus aureus, Staphylococcus epidermidis, methicillin resistant Staphylococcus aureus (MRSA), vancomycin resistant Staphylococcus aureus (VRSA), Staphylococcus lugdunensis, Staphylococcus saprophyticus, Streptococcus pneumonia, Streptococcus pyogenes, or Streptococcus mutants.

[0305] 29. The nucleic acid composition of embodiment 24, wherein the pathogen is a fungus, an amoeba, or a parasite.

[0306] 30. The nucleic acid composition of embodiment 29, wherein the fungus, the amoeba, or the parasite is Acanthamoeba spp, American tryppanosomiasis, Balamuthia mandnillanis, Babesia divergenes, Babesia bigemina, Babesia equi, Babesia microfti, Babesia duncani, Balantidium coli, Blastocystis spp Cryptosporidium spp, Cyclospora cayetanensis, dientamoeba fragilis, Diphyllobothrium latum, Leishmania amazonesis, Naegleria fowderi, Plasmodium falciparum, Plasmodium vivax, Plasmodium ovale curtisi, Plasmodium malariae, Rhinosporidium seeberi, Sarcocystis bovihominis, Sarcocystiss suihominis, Toxoplasma gondii, Trichmonas vaginalis, Trypanosoma brucei, Trypanosoma cruzi, and Taenia multiceps.

[0307] 31. The nucleic acid composition of any one of embodiments 1-30, wherein the exogeneous polynucleotide encodes a gene editing tool.

[0308] 32 The nucleic acid composition of embodiment 31, wherein the gene editing tool is selected from a group consisting of meganuclease associated agents, CRISPR associated agents, TALEN associated agents, and zinc finger associated agents.

[0309] 33. The nucleic acid composition of any one of embodiments 1-30, wherein the exogeneous polynucleotide is a small interfering RNA (siRNA), antisense RNA, micro RNA (miRNA), small or short hairpin RNA (shRNA), guide RNA (gRNA), clustered regularly interspaced short palindromic repeat RNA (crRNA), trans-activating clustered regularly interspaced short palindromic repeat RNA (tracrRNA), immune-stimulating oligonucleotide, antisense nucleic acid, or ribozyme.

[0310] 34. The nucleic acid composition of embodiment 33, wherein the exogeneous polynucleotide targets beta-secretase 1 (BACE1) and/or amyloid precursor protein (APP).

[0311] 35. The nucleic acid composition of any one of embodiments 1-30, wherein the exogeneous polynucleotide encodes a polypeptide associated with a genetic disorder.

[0312] 36. The nucleic acid composition of embodiment 35, wherein the polypeptide is brain-derived neurotrophin factor (BDNF), nerve growth factor (NGF), Neprilysin inhibitors (NEP), endothelin converting enzyme (ECE), cathepsin B (CTSB), apolipoprotein E 2 (APOE2), SH3 and multiple ankyrin repeat domains protein (SHANK), neurturin (NRTN), glial cell-derived neurotrophic factor (GDNF), cerebral dopamine neurotrophic factor (CDNF), vascular endothelial growth factor A (VEGF-A), or aromatic L-amino acid decarboxylase (AADC).

[0313] 37. The nucleic acid composition of any one of embodiments 1-30, wherein the exogeneous polynucleotide encodes a therapeutic agent or a diagnostic agent.

[0314] 38. The nucleic acid composition of embodiment 37, wherein the therapeutic agent is an antibody-based therapeutic agent, a hormone, a cytokine, an inhibitor or antagonist of an immune checkpoint regulator, an immune stimulatory molecule, or an agonist of an immune co-stimulatory molecule.

[0315] 39. The nucleic acid composition of embodiment 38, wherein the inhibitor or antagonist of an immune checkpoint regulator is an anti-PD1 antibody.

[0316] 40. The nucleic acid composition of embodiment 38, wherein the antibody-based therapeutic agent is an antibody, a functional fragment of an antibody, a chimeric antigen receptor (CAR), or a T cell receptor (TCR).

[0317] 41. The nucleic acid composition of embodiment 38, wherein the cytokine comprises lymphokine, monokine, polypeptide hormone, growth hormone, parathyroid hormone, thyroxine, insulin, proinsulin, relaxin, prorelaxin, glycoprotein hormone, follicle stimulating hormone (FSH), thyroid stimulating hormone (TSH), luteinizing hormone (LH), hepatic growth factor, fibroblast growth factor, prolactin, placental lactogen, tumor necrosis factor-a and -β, mullerian-inhibiting substance, mouse gonadotropin-associated peptide, inhibin, activin, vascular endothelial growth factor, integrin, thrombopoietin (TPO), nerve growth factor, NGF-β, platelet growth factor, transforming growth factor (TGF), TGF-a, TGF-β, insulin-like growth factor-I and -II, erythropoietin (EPO), osteoinductive factor, interferon, such as interferon-a, -β and -γ, colony stimulating factor (CSF), macrophage-CSF (M-CSF), granulocyte-macrophage-CSF (GM-CSF), granulocyte-CSF (GCSF), interleukin (IL), tumor necrosis factor, TNF-a, TNF-β, LIF, or kit ligand (KL), or a combination of two or more thereof.

[0318] 42. The nucleic acid composition of the preceding embodiments, wherein the exogeneous polynucleotide is up to or about 10,000 nucleotides long.

[0319] 43. The nucleic acid composition of the preceding embodiments, wherein components of the nucleic acid composition are expressed on one or more separate nucleic acids.

[0320] 44. The nucleic acid composition of the preceding embodiments, further comprising one or more expression control elements in operable linkage that confers expression of the nucleic acid composition in vitro or in vivo.

[0321] 45. The nucleic acid composition of embodiment 44, wherein the expression control element is a promoter that drives expression of the nucleic acid complex in vitro.

[0322] 46. The nucleic acid composition of embodiment 45, wherein the promoter is T7, T3, SP6 or any phage promoter.

[0323] 47. The nucleic acid composition of embodiment 44, wherein the expression control element is a promoter that drives expression of the nucleic acid complex in a target cell.

[0324] 48. The nucleic acid composition of embodiment 47, wherein the promoter is CMV, SV40 or any eukaryotic promoter.

[0325] 49. The nucleic acid composition of embodiment 47 or embodiment 48, wherein the target cell is a neuron, or a non-neuron cell, VERO, COS, CHO, C6/36, HeLa, HEK, or HepG2.

[0326] 50. The nucleic acid composition of embodiment 47 or embodiment 48, wherein the target cell is an oligodendrocyte, microglia, or astrocyte.

[0327] 51. A pharmaceutical composition comprising the nucleic acid composition of the preceding embodiments with a pharmaceutically acceptable salt or derivative thereof.

[0328] 52. A recombinant zika virus or a zika-virus-like particle that is generated from expressing the nucleic acid of one of embodiments 1-51 in a producer cell, wherein the producer cell is further infected by a second zika virus, such that the zika virus C or the derivative of the zika virus C, the zika virus prM/M or the derivative of the zika virus prM/M, and the zika virus E or the derivative of the zika virus E are present in the recombinant zika virus or the zika-virus-like particle.

[0329] 53. The recombinant zika virus or the zika-virus-like particle of embodiment 52, wherein the second zika virus is a wild-type zika virus.

[0330] 54. The recombinant zika virus or the zika-virus-like particle of embodiment 53, wherein the wild-type zika virus is an African, an Asian and a Brazilian strain.

[0331] 55. The recombinant zika virus or the zika-virus-like particle of embodiment 53, wherein the second zika virus is a modified zika virus.

[0332] 56. The recombinant zika virus or the zika-virus-like particle of embodiment 55, wherein the modified zika virus comprises one or more microRNA-based gene-silencing machineries.

[0333] 57. The recombinant zika virus or the zika-virus-like particle of embodiment 56, wherein the one or more microRNA-based gene-silencing machineries control viral replication.

[0334] 58. A recombinant zika virus or a zika-virus-like particle that is generated from expressing the nucleic acid of embodiments 1-51 in a producer cell, without an infection of a second zika virus, wherein the zika virus C or the derivative of the zika virus C, the zika virus prM/M or the derivative of the zika virus prM/M, and the zika virus E or the derivative of the zika virus E are present in the recombinant zika virus or the zika-virus-like particle.

[0335] 59. The recombinant zika virus or the zika-virus-like particle of one of embodiments 52-58, wherein the producer cell is a Vero E6, HEK, HEK 293T, HEK 293TT, FreeStyle™ 293-F Cell, HEK-293.2sus or C6/36 cell.

[0336] 60. The recombinant zika virus or the zika-virus-like particle of one of embodiments 52-59, wherein the recombinant zika virus is replication competent.

[0337] 61. The recombinant zika virus or the zika-virus-like particle of one of embodiments 52-60, wherein the recombinant zika virus is replication incompetent without lowering the vector titer or impairing expression of the exogeneous polynucleotide.

[0338] 62. The recombinant zika virus or the zika-virus-like particle of one of embodiments 52-61, wherein the recombinant zika virus or the zika-virus-like particle has decreased insertional mutagenesis.

[0339] 63. The recombinant zika virus or the zika-virus-like particle of one of embodiments 52-62, wherein the recombinant zika virus or the zika-virus-like particle has decreased immune response.

[0340] 64. A pharmaceutical composition comprising the recombinant zika virus or the zika-virus-like particle of one of one of embodiments 52-63, with a pharmaceutically acceptable salt or derivative thereof.

[0341] 65. A method of delivering an exogeneous polynucleotide to a target cell, the method comprising administering to the target cell with the recombinant zika virus or the zika-virus-like particle of one of embodiments 52-64 comprising the exogeneous polynucleotide.

[0342] 66 The method of embodiment 65, wherein the target cell is a neuron or a non-neuron cell.

[0343] 67. The method of embodiment 66, wherein the neuron is an oligodendrocyte, microglia, or astrocyte.

[0344] 68. The method of embodiment 66, wherein the non-neuron cell is a prostate epithelial cell, a urethra epithelial cell, a Sertoli cell, a Leydig cell, a spermatogonium cell, or a retinal cell.

[0345] 69. The method of one of embodiments 65-68, wherein the method is carried out in vitro, ex vivo, or in vivo.

[0346] 70. The method of one of embodiments 65-69, wherein the target cell transiently expresses the exogeneous polynucleotide after delivery.

[0347] 71. The method of one of embodiments 65-69, wherein the target cell persistently expresses the exogeneous polynucleotide after delivery.

[0348] 72. A method of treating Alzheimer's disease in a subject in need thereof, the method comprising administering to the subject an effective amount of the recombinant zika virus or the zika-virus-like particle of one of embodiments 52-71 comprising a polynucleotide encoding a brain-derived neurotrophin factor (BDNF).

[0349] 73. A method of treating autism in a subject in need thereof, the method comprising administering to the subject an effective amount of the recombinant zika virus or the zika-virus-like particle of one of embodiments 52-71 comprising a polynucleotide encoding SH3 and multiple ankyrin repeat domains protein (SHANK).

[0350] 74. A method of treating Parkinson's disease in a subject in need thereof, the method comprising administering the subject an effective amount of the recombinant zika virus or the zika-virus-like particle one of embodiments 52-71 comprising a polynucleotide encoding aromatic L-amino acid decarboxylase (AADC).

[0351] 75. The method of one of embodiments 65-74, wherein the administrating is via systemic delivery.

[0352] 76. The method of one of embodiments 65-74, wherein the administrating is performed intravenously and/or intratumorly.

[0353] 77. The method of embodiment one of embodiments 65-76, wherein the administrating targets the cerebral spinal fluid in intracerebroventricular, cisterna magna, subpial, and/or intrathecal.

[0354] 78. The method of embodiment one of embodiments 65-77, wherein the administrating is not performed intraparenchymally.

[0355] 79. A nucleic acid composition comprising (i) a polynucleotide encoding a ribozyme (ii) 5′untranslated region (UTR) of a zika virus; (iii) 3′UTR of the zika virus; and (iv) a polynucleotide exogenous to the zika virus;
[0356] optionally wherein the polynucleotide encoding the ribozyme is positioned before the 5′ UTR or after the 3′ UTR;
[0357] further optionally wherein the polynucleotide encoding a ribozyme is a first polynucleotide encoding a ribozyme and the nucleic acid composition comprises a second polynucleotide encoding a ribozyme, and the first polynucleotide is positioned before the 5′ UTR and the second polynucleotide is positioned after the 3′ UTR.

[0358] 80. The nucleic acid composition of embodiment 79, wherein the ribozyme is a hammerhead ribozyme or a hepatitis delta virus (HDV) ribozyme.

[0359] 81. The nucleic acid composition of embodiment 79 or embodiment 80, comprising a polynucleotide encoding a second ribozyme.

[0360] 82. The nucleic acid composition of embodiment 81, wherein the second ribozyme is a hammerhead ribozyme or a hepatitis delta virus (HDV) ribozyme.

[0361] 83. The nucleic acid composition of embodiment 81 or embodiment 82, wherein the polynucleotide encoding the ribozyme encodes a hammerhead ribozyme and the polynucleotide encoding the second ribozyme encodes a HDV ribozyme.

[0362] 84. The nucleic acid composition of any one of embodiments 79-83, comprising a C-partial (e.g., a polynucleotide encoding a truncation of C, such as less than or about 30, 25, 20, 15, 10, or 5 amino acids of C).

[0363] 85. The nucleic acid composition of any one of embodiments 79-84, wherein the zika virus is an African zika virus, an Asian zika virus, a Brazilian zika virus components, or a combination of one or two thereof.

[0364] 86 The nucleic acid composition of any one of embodiments 79-85, wherein the zika virus is African MR766 strain.

[0365] 87. The nucleic acid composition of any one of embodiments 79-86, wherein the exogeneous polynucleotide is an antigen or an antigenic epitope thereof.

[0366] 88. The nucleic acid composition of embodiment 87, wherein the antigen or an antigenic epitope thereof is disease associated.

[0367] 89. The nucleic acid composition of embodiment 88, wherein the antigen or an antigenic epitope thereof is from a pathogen.

[0368] 90. The nucleic acid composition of embodiment 89, wherein the pathogen is a virus.

[0369] 91. The nucleic acid composition of embodiment 90, wherein the virus is a human SARS coronavirus, an influenza A virus, an influenza B virus, an influenza C virus an ebolavirus, a hepatitis B virus, a hepatitis C virus, a herpes simplex virus, a human immunodeficiency virus (HIV), a human papillomavirus (HPV-6, HPV-11), a measles virus, a rabies virus, a poliovirus, or a yellow fever virus.

[0370] 92. The nucleic acid composition of embodiment 89, wherein the pathogen is a bacteria.

[0371] 93. The nucleic acid composition of embodiment 92, wherein the bacteria is Acinetobacter baumanii, Aggregatobacter actinomycetemcomitans, Bartonella bacilliformis, Bartonella. henselae, Bartonella quintana, Bifidobacterium Borrelia, Bortadella pertussis, Brucella sp, Burkholderia cepacis, Burkholderia psedomallei, Campylobacter jejuni, Cardiobacterium hominis, Campylobacter fetus, Chlamydia pneumonia, Chlymydia trahomatis, Clostridium difficile, Cyanobacteria, Eikennella corrodens, Enterobacter, Enterococcus faccium, Escherichia coli, Escherichia coli 0157, Franceilla tularensis, Fusobacterium nucleatum, Haemophilus influenza, Haemophilus aphrophilus, Haemophilus ducreyi, Haemophilus parainfluenzae, Helicobacter pylori, Kingella kingae, Klebsiella pneumonia, Legionella bacteria, Legionella pneumophila serogroup 1, Leptospria, Morganella morganii, Neisseria gonorrhoeae, Neisseria meningitidis, Proteus mirabilis, Proteus vulgaris, Proteus myxofaciens, Providencia rettgeri, Providencia alcalifaciens, Providencia stuartii, Pseudomonas aeruginosa, Pseudomonas paucimobilis, Pseudomonas putida, Pseudomonas fluorescens, Pseudomonas acidovorans, Rickettsiae, Salmonella enterica, Salmonella typhi, Salmonella paratyphi types A, B typhus, Salmonella. dublin, Salmonella arizonae, Salmonella choleraesuis, Serratia marcescens, Schigella dysenteriae, Schigella flexneri, Schigella boydii, Schigella sonnei, Treponema, Stenotrophomonas maltophilia, Vibrio cholerae, Vibrio mimicus, Vibrio alginolyticus, Vibrio hollisae, Vibrio parahaemolyticus, Vibrio vulnificus, Yersinia pestitis, Actinomycetes, Bacillus anthracis, Bacillus subtilis, Clostridium tetani, Clostridium. perfingens, Clostridium botulinum, Clostridium tetani. Corynebacterium diphtheriae, Enterococcus faecalis, Enterococcus faecium, Erysipelothrix ruhsiopathiae, Listeria monocytogenes, Mycobacterium leprae, Mycobacterium tuberculosis, Mycoplasma, Nocardia, Propionibacerium, Pseudomonas aeruginosa, Pneumococci, Staphylococcus aureus, Staphylococcus epidermidis, methicillin resistant Staphylococcus aureus (MRSA), vancomycin resistant Staphylococcus aureus (VRSA), Staphylococcus lugdunensis, Staphylococcus saprophyticus, Streptococcus pneumonia, Streptococcus pyogenes, or Streptococcus mutants.

[0372] 94. The nucleic acid composition of embodiment 89, wherein the pathogen is a fungus, an amoeba, or a parasite.

[0373] 95. The nucleic acid composition of embodiment 94, wherein the fungus, the amoeba, or the parasite is Acanthamoeba spp, American tryppanosomiasis, Balamuthia mandnillanis, Babesia divergenes, Babesia bigemina, Babesia equi, Babesia microfti, Babesia duncani, Balantidium coli, Blastocystis spp Cryptosporidium spp, Cyclospora cayetanensis, dientamoeba fragilis, Diphyllobothrium latum, Leishmania amazonesis, Naegleria fowderi, Plasmodium falciparum, Plasmodium vivax, Plasmodium ovale curtisi, Plasmodium malariae, Rhinosporidium seeberi, Sarcocystis bovihominis, Sarcocystiss suihominis, Toxoplasma gondii, Trichmonas vaginalis, Trypanosoma brucei, Trypanosoma cruzi, and Taenia multiceps.

[0374] 96. The nucleic acid composition of any one of embodiments 79-95, wherein the exogeneous polynucleotide encodes a gene editing tool.

[0375] 97. The nucleic acid composition of embodiment 96, wherein the gene editing tool is selected from a group consisting of meganuclease associated agents, CRISPR associated agents, TALEN associated agents, and zinc finger associated agents.

[0376] 98. The nucleic acid composition of any one of embodiments 79-97, wherein the exogeneous polynucleotide is a small interfering RNA (siRNA), antisense RNA, micro RNA (miRNA), small or short hairpin RNA (shRNA), guide RNA (gRNA), clustered regularly interspaced short palindromic repeat RNA (crRNA), trans-activating clustered regularly interspaced short palindromic repeat RNA (tracrRNA), immune-stimulating oligonucleotide, antisense nucleic acid, or ribozyme.

[0377] 99. The nucleic acid composition of embodiment 98, wherein the exogeneous polynucleotide targets BACE1 or APP.

[0378] 100. The nucleic acid composition of any one of embodiments 79-99, wherein the exogeneous polynucleotide encodes a polypeptide associated with a genetic disorder.

[0379] 101. The nucleic acid composition of embodiment 100, wherein the polypeptide is brain-derived neurotrophin factor (BDNF), nerve growth factor (NGF), Neprilysin inhibitors (NEP), endothelin converting enzyme (ECE), cathepsin B (CTSB), apolipoprotein E 2 (APOE2), SH3 and multiple ankyrin repeat domains protein (SHANK), neurturin (NRTN), glial cell-derived neurotrophic factor (GDNF), cerebral dopamine neurotrophic factor (CDNF), vascular endothelial growth factor A (VEGF-A), or aromatic L-amino acid decarboxylase (AADC).

[0380] 102. The nucleic acid composition of any one of embodiments 79-101, wherein the exogeneous polynucleotide encodes a therapeutic agent or a diagnostic agent.

[0381] 103. The nucleic acid composition of embodiment 102, wherein the therapeutic agent is an antibody-based therapeutic agent, a hormone, a cytokine, an inhibitor or antagonist of an immune checkpoint regulator, an immune stimulatory molecule, or an agonist of an immune co-stimulatory molecule.

[0382] 104. The nucleic acid composition of embodiment 103, wherein the inhibitor or antagonist of an immune checkpoint regulator is an anti-PD1 antibody.

[0383] 105. The nucleic acid composition of embodiment 103, wherein the antibody-based therapeutic agent is an antibody, a functional fragment of an antibody, a chimeric antigen receptor (CAR), or a T cell receptor (TCR).

[0384] 106. The nucleic acid composition of embodiment 103, wherein the cytokine comprises lymphokine, monokine, polypeptide hormone, growth hormone, parathyroid hormone, thyroxine, insulin, proinsulin, relaxin, prorelaxin, glycoprotein hormone, follicle stimulating hormone (FSH), thyroid stimulating hormone (TSH), luteinizing hormone (LH), hepatic growth factor, fibroblast growth factor, prolactin, placental lactogen, tumor necrosis factor-a and -β, mullerian-inhibiting substance, mouse gonadotropin-associated peptide, inhibin, activin, vascular endothelial growth factor, integrin, thrombopoietin (TPO), nerve growth factor, NGF-β, platelet growth factor, transforming growth factor (TGF), TGF-a, TGF-β, insulin-like growth factor-I and -II, erythropoietin (EPO), osteoinductive factor, interferon, such as interferon-a, -β and -γ, colony stimulating factor (CSF), macrophage-CSF (M-CSF), granulocyte-macrophage-CSF (GM-CSF), granulocyte-CSF (GCSF), interleukin (IL), tumor necrosis factor, TNF-a, TNF-β, LIF, or kit ligand (KL), or a combination of two or more thereof.

[0385] 107. The nucleic acid composition of one of embodiments 79-106, wherein the exogeneous polynucleotide is up to or about 10,000 nucleotides long.

[0386] 108. The nucleic acid composition of one of embodiments 79-107, comprising one or more expression control elements in operable linkage that confers expression of the nucleic acid composition in vitro.

[0387] 109. The nucleic acid composition of embodiment 108, wherein the expression control element is a promoter that drives expression of the nucleic acid complex in vitro.

[0388] 110. The nucleic acid composition of embodiment 109, wherein the promoter is T7, T3, SP6 or any phage promoter.

[0389] 111. A pharmaceutical composition comprising the nucleic acid composition of one of embodiments 79-110 with a pharmaceutically acceptable salt or derivative thereof.

[0390] 112. A method of delivering an exogeneous polynucleotide to a target cell, the method comprising applying to the target cell a compound produced from the nucleic acid composition of one of embodiments 79-111 comprising the exogeneous polynucleotide; optionally wherein the compound has a tropism for the target cell; further optionally wherein the target cell is a cell of the central nervous system; further optionally wherein the target cell is present in a subject and applying to the target cell comprises administering the compound to the subject; further optionally wherein the subject is a human or non-human animal.

[0391] 113. The method of embodiment 112, wherein the compound is produced by encapsulating a transcript produced from the nucleic acid composition with a lipid-based agent.

[0392] 114. The method of embodiment 113, wherein the transcript is capless.

[0393] 115. The method of embodiment 113 or embodiment 114, wherein the transcript is produced by in vitro transcribing the nucleic acid composition.

[0394] 116. The method of any one of embodiments 112-115, wherein the lipid-based agent is a lipofectamine-related reagent, a liposome, or a lipid nanoparticle.

[0395] 117. A method of triggering or boosting an immune response in a subject, the method comprising administering to the subject an effective amount of a compound produced from the nucleic acid composition of one of embodiments 79-110 or the composition of embodiment 11 comprising an antigen or an antigenic epitope thereof; optionally wherein the subject is a human or non-human animal.

[0396] 118. The method of embodiment 117, wherein the compound is produced by encapsulating a transcript produced from the nucleic acid composition with a lipid-based agent.

[0397] 119. The method of embodiment 118, wherein the transcript is capless.

[0398] 120. The method of embodiment 188 or embodiment 119, wherein the transcript is produced by in vitro transcribing the nucleic acid composition.

[0399] 121. The method of any one of embodiments 117-120, wherein the lipid-based agent is a lipofectamine related reagent, a liposome, or a lipid nanoparticle.

[0400] 122. The method of any one of embodiments 112-121, wherein the administrating is performed intramuscularly.

[0401] 123. The method of any one of embodiments 112-122, wherein the antigen or an antigenic epitope thereof is from a pathogen.

[0402] 124. The method of embodiment 123, wherein the pathogen is a virus.

[0403] 125. The method of embodiment 124, wherein the virus is a human SARS coronavirus, an influenza A virus, an influenza B virus, an influenza C virus an ebolavirus, a hepatitis B virus, a hepatitis C virus, a herpes simplex virus, a human immunodeficiency virus (HIV), a human papillomavirus (HPV-6, HPV-11), a measles virus, a rabies virus, a poliovirus, or a yellow fever virus.

[0404] 126. The method of embodiment 123, wherein the pathogen is a bacterium.

[0405] 127. The method of embodiment 126, wherein the bacteria is Acinetobacter baumanii, Aggregatobacter actinomycetemcomitans, Bartonella bacilliformis, Bartonella. henselae, Bartonella quintana, Bifidobacterium Borrelia, Bortadella pertussis, Brucella sp, Burkholderia cepacis, Burkholderia psedomallei, Campylobacter jejuni, Cardiobacterium hominis, Campylobacter fetus, Chlamydia pneumonia, Chlymydia trahomatis, Clostridium difficile, Cyanobacteria, Eikennella corrodens, Enterobacter, Enterococcus faccium, Escherichia coli, Escherichia coli 0157, Franceilla tularensis, Fusobacterium nucleatum, Haemophilus influenza, Haemophilus aphrophilus, Haemophilus ducreyi, Haemophilus parainfluenzae, Helicobacter pylori, Kingella kingae, Klebsiella pneumonia, Legionella bacteria, Legionella pneumophila serogroup 1, Leptospria, Morganella morganii, Neisseria gonorrhoeae, Neisseria meningitidis, Proteus mirabilis, Proteus vulgaris, Proteus myxofaciens, Providencia rettgeri, Providencia alcalifaciens, Providencia stuartii, Pseudomonas aeruginosa, Pseudomonas paucimobilis, Pseudomonas putida, Pseudomonas fluorescens, Pseudomonas acidovorans, Rickettsiae, Salmonella enterica, Salmonella typhi, Salmonella paratyphi types A, B typhus, Salmonella. dublin, Salmonella arizonae, Salmonella choleraesuis, Serratia marcescens, Schigella dysenteriae, Schigella flexneri, Schigella boydii, Schigella sonnei, Treponema, Stenotrophomonas maltophilia, Vibrio cholerae, Vibrio mimicus, Vibrio alginolyticus, Vibrio hollisae, Vibrio parahaemolyticus, Vibrio vulnificus, Yersinia pestitis, Actinomycetes, Bacillus anthracis, Bacillus subtilis, Clostridium tetani, Clostridium. perfingens, Clostridium botulinum, Clostridium tetani. Corynebacterium diphtheriae, Enterococcus faecalis, Enterococcus faecium, Erysipelothrix ruhsiopathiae, Listeria monocytogenes, Mycobacterium leprae, Mycobacterium tuberculosis, Mycoplasma, Nocardia, Propionibacerium, Pseudomonas aeruginosa, Pneumococci, Staphylococcus aureus, Staphylococcus epidermidis, methicillin resistant Staphylococcus aureus (MRSA), vancomycin resistant Staphylococcus aureus (VRSA), Staphylococcus lugdunensis, Staphylococcus saprophyticus, Streptococcus pneumonia, Streptococcus pyogenes, or Streptococcus mutants.

[0406] 128. The method of embodiment 123, wherein the pathogen is a fungus, an amoeba, or a parasite.

[0407] 129. The method of embodiment 128, wherein the fungus, the amoeba, or the parasite is Acanthamoeba spp, American tryppanosomiasis, Balamuthia mandnillanis, Babesia divergenes, Babesia bigemina, Babesia equi, Babesia microfti, Babesia duncani, Balantidium coli, Blastocystis spp Cryptosporidium spp, Cyclospora cayetanensis, dientamoeba fragilis, Diphyllobothrium latum, Leishmania amazonesis, Naegleria fowderi, Plasmodium falciparum, Plasmodium vivax, Plasmodium ovale curtisi, Plasmodium malariae, Rhinosporidium seeberi, Sarcocystis bovihominis, Sarcocystiss suihominis, Toxoplasma gondii, Trichmonas vaginalis, Trypanosoma brucei, Trypanosoma cruzi, and Taenia multiceps.

TABLE 1A
Non-limiting example Zika sequences

| | Example Zika |
|---|---|
| SEQ ID NO | virus components |
| 1 | 5′UTR |
| 2 | 3′UTR |
| 3 | C |
| 4 | prM/M |
| 5 | E |
| 6 | NS1 |
| 7 | NS2A |
| 8 | NS2B |
| 9 | NS3 |
| 10 | NS4A |
| 11 | 2k |
| 12 | NS4B |
| 13 | NS5 |

TABLE 1B
Non-limiting example Zika 3′ UTR sequences

| SEQ | |
|---|---|
| ID NO | Zika viruses with example 3′ UTRs |
| 14 | NC_035889.1 Zika virus isolate ZIKV/H. sapiens/Brazil/Natal/2015, complete genome |
| 15 | NC_012532.1 Zika virus, complete genome |
| 16 | OL450364.1 Zika virus isolate ZIKV/Haiti/1238/2015, complete genome |
| 17 | OL450365.1 Zika virus isolate ZIKV/Haiti/0478/2015, complete genome |
| 18 | OL450366.1 Zika virus isolate ZIKV/Haiti/1332/2015, complete genome |
| 19 | OL414716.1 Zika virus isolate 15555, complete genome |
| 20 | OK571913.1 Zika virus isolate Homo sapiens/Haiti/0728/2014, complete genome |
| 21 | OK054351.1 Zika virus isolate 211784, complete genome |
| 22 | MT377491.1 Zika virus isolate MU-DMSC-1/2017, complete genome |
| 23 | MT377492.1 Zika virus isolate MU-DMSC-1/2016, complete genome |
| 24 | MT377493.1 Zika virus isolate MU-DMSC-2/2017, complete genome |
| 25 | MT377494.1 Zika virus isolate MU-DMSC-3/2017, complete genome |
| 26 | MT377495.1 Zika virus isolate MU-DMSC-4/2017, complete genome |
| 27 | MT377496.1 Zika virus isolate MU-DMSC-2/2016, complete genome |
| 28 | MT377497.1 Zika virus isolate MU-DMSC-3/2016, complete genome |
| 29 | MT377498.1 Zika virus isolate MU-DMSC-4/2016, complete genome |
| 30 | MT377499.1 Zika virus isolate MU-DMSC-5/2016, complete genome |
| 31 | MT377500.1 Zika virus isolate MU-DMSC-6/2016, complete genome |
| 32 | MT377501.1 Zika virus isolate MU-DMSC-5/2017, complete genome |
| 33 | MT377502.1 Zika virus isolate NS-274/2006, complete genome |
| 34 | MT377503.1 Zika virus isolate 15-1144, complete genome |
| 35 | MT377504.1 Zika virus isolate NS-110/2006, complete genome |
| 36 | MZ008356.1 Zika virus isolate ZIKV/Homo_{—}sapiens/Cambodia/2019/SZ1901, complete |
| | genome |
| 37 | MW143022.1 Zika virus strain MR766, complete genome |
| 38 | MW680969.1 Zika virus isolate rGZ02a/2018, complete genome |
| 39 | MW680970.1 Zika virus isolate rGZ02p/2018, complete genome |
| 40 | MW015936.1 Zika virus isolate Zika virus/H. sapiens-tc/THA/2006/CVD_06-020, complete |
| | genome |
| 41 | MN101548.1 Zika virus isolate Salvador, complete genome |
| 42 | MT505349.1 Mutant Zika virus isolate DK, complete genome |
| 43 | MT505350.1 Mutant Zika virus isolate DK23, complete genome |
| 44 | MT636065.1 Zika virus isolate ARCB116141, complete genome |
| 45 | MT483911.1 Zika virus isolate 800/16, complete genome |
| 46 | MT507047.1 Zika virus isolate S-542/Yucatan/2017, complete genome |
| 47 | MT507048.1 Zika virus isolate S-542/Yucatan/2017 clone 6C, complete genome |
| 48 | MT507049.1 Zika virus isolate S-542/Yucatan/2017 clone 6V, complete genome |
| 49 | MT507050.1 Zika virus isolate S-542/Yucatan/2017 clone 6A, complete genome |
| 50 | MK566202.1 Zika virus isolate 15098, complete genome |
| 51 | MK241415.1 Zika virus isolate ZIKV/Homo_{—}sapiens/CPV/2015/CV448c, complete genome |
| 52 | MK241416.1 Zika virus isolate ZIKV/Homo_{—}sapiens/CPV/2015/CV487, complete genome |
| 53 | MK241417.1 Zika virus isolate ZIKV/Homo_{—}sapiens/CPV/2016/CV907u, complete genome |
| 54 | MN611472.1 Zika virus isolate 2019YNZIKV02, complete genome |
| 55 | MN566104.1 Zika virus isolate Haiti/0011/2016, complete genome |
| 56 | MN566105.1 Zika virus isolate Haiti/0375/2016, complete genome |
| 57 | MN566106.1 Zika virus isolate Haiti/0395/2016, complete genome |
| 58 | MN566107.1 Zika virus isolate Haiti/0165/2016, complete genome |
| 59 | MN566108.1 Zika virus isolate Haiti/0866/2016, complete genome |
| 60 | MN577543.1 Zika virus isolate Haiti/1327/2014, complete genome |
| 61 | MN577544.1 Zika virus isolate Haiti/0148/2016, complete genome |
| 62 | MN577550.1 Zika virus isolate ZIKV-Nicaragua/2016-UCB7420, complete genome |
| 63 | MN100039.1 Zika virus isolate ZIKV/Homo sapiens/PAN/CDC-259249_V1-V3/2015, complete |
| | genome |
| 64 | MN124090.1 Zika virus isolate ZIKV/Homo sapiens/PAN/CDC-259249_V1-V3/2015, complete |
| | genome |
| 65 | MN124091.1 Zika virus isolate ZIKV/Homo sapiens/PAN/CDC-259249_V1-V3/2015, complete |
| | genome |
| 66 | MH675619.1 Zika virus isolate CTS-30-16p, complete genome |
| 67 | MH675620.1 Zika virus isolate CTS-36-16p, complete genome |
| 68 | MH675621.1 Zika virus isolate CTS-47-16p, complete genome |
| 69 | MH675622.1 Zika virus isolate CTS-50-16p, complete genome |
| 70 | MH675623.1 Zika virus isolate CTS-56-16p, complete genome |
| 71 | MH675624.1 Zika virus isolate CTS-61-16p, complete genome |
| 72 | MH675625.1 Zika virus isolate CTS-178-16p, complete genome |
| 73 | MH675626.1 Zika virus isolate CTS-183-16p, complete genome |
| 74 | MH675627.1 Zika virus isolate CTS-193-16p, complete genome |
| 75 | MH675628.1 Zika virus isolate CTS-223-16p, complete genome |
| 76 | MH675629.1 Zika virus isolate QTX-02, complete genome |
| 77 | MH675630.1 Zika virus isolate QTX-04, complete genome |
| 78 | MN025403.1 Zika virus isolate 15555, complete genome |
| 79 | MK713748.1 Zika virus isolate PRVABC59, complete genome |
| 80 | MH900227.1 Zika virus isolate 31N, complete genome |
| 81 | MH882527.1 Zika virus isolate Zika virus/H. sapiens-wt/BRA/2016/ZKV17Asem_2016-04-26, |
| | complete genome |
| 82 | MH882528.1 Zika virus isolate Zika virus/H. sapiens-wt/BRA/2016/ZKV17Auri_2016-04-26, |
| | complete genome |
| 83 | MH882529.1 Zika virus isolate Zika virus/H. sapiens-wt/BRA/2016/ZKV17Bsem_2016-05-03, |
| | complete genome |
| 84 | MH882530.1 Zika virus isolate Zika virus/H. sapiens-wt/BRA/2016/ZKV17Csem_2016-05-10, |
| | complete genome |
| 85 | MH882531.1 Zika virus isolate Zika virus/H. sapiens-wt/BRA/2016/ZKV17Dsem_2016-05-17, |
| | complete genome |
| 86 | MH882532.1 Zika virus isolate Zika virus/H. sapiens-wt/BRA/2016/ZKV17Esem_2016-05-24, |
| | complete genome |
| 87 | MH882533.1 Zika virus isolate Zika virus/H. sapiens-wt/BRA/2016/ZKV17Fsem_2016-05-31, |
| | complete genome |
| 88 | MH882534.1 Zika virus isolate Zika virus/H. sapiens-wt/BRA/2016/ZKV17Gsem_2016-06-08, |
| | complete genome |
| 89 | MH882535.1 Zika virus isolate Zika virus/H. sapiens-wt/BRA/2016/ZKV17Hsem_2016-06-16, |
| | complete genome |
| 90 | MH882536.1 Zika virus isolate Zika virus/H. sapiens-wt/BRA/2016/ZKV17Jsem_2016-06-28, |
| | complete genome |
| 91 | MH882538.1 Zika virus isolate Zika virus/H. sapiens-wt/BRA/2016/ZKV17Lsem_2016-07-12, |
| | complete genome |
| 92 | MH882539.1 Zika virus isolate Zika virus/H. sapiens-wt/BRA/2016/ZKV17Msem_2016-07-19, |
| | complete genome |
| 93 | MH882540.1 Zika virus isolate Zika virus/H. sapiens-wt/BRA/2016/ZKV17Nsem_2016-07-27, |
| | complete genome |
| 94 | MH882541.1 Zika virus isolate Zika virus/H. sapiens-wt/BRA/2016/ZKV17sem_2016-04-19, |
| | complete genome |
| 95 | MH882542.1 Zika virus isolate Zika virus/H. sapiens-wt/BRA/2016/ZKV17uri_2016-04-19, |
| | complete genome |
| 96 | MH882543.1 Zika virus isolate Zika virus/H. sapiens-wt/BRA/2016/ZKV19Auri_2016-05-05, |
| | complete genome |
| 97 | MH882544.1 Zika virus isolate Zika virus/H. sapiens-wt/BRA/2016/ZKV19Bsem_2016-05-12, |
| | complete genome |
| 98 | MH882545.1 Zika virus isolate Zika virus/H. sapiens-wt/BRA/2016/ZKV19Csem_2016-05-19, |
| | complete genome |
| 99 | MH882546.1 Zika virus isolate Zika virus/H. sapiens-wt/BRA/2016/ZKV19Dsem_2016-05-24, |
| | complete genome |
| 100 | MH882547.1 Zika virus isolate Zika virus/H. sapiens-wt/BRA/2016/ZKV19Esem_2016-06-02, |
| | complete genome |
| 101 | MH882548.1 Zika virus isolate Zika virus/H. sapiens-wt/BRA/2016/ZKV19Fsem_2016-06-09, |
| | complete genome |
| 102 | MK105975.1 Zika virus strain MR766, complete genome |
| 103 | MF783072.1 Zika virus strain Zika virus/mosquito/Haiti/1855/2016, complete genome |
| 104 | MF783073.1 Zika virus strain Zika virus/mosquito/Haiti/1919/2016, complete genome |
| 105 | MG770187.1 Zika virus isolate SV0127-14, complete genome |
| 106 | MG770188.1 Zika virus isolate SV0127-14, complete genome |
| 107 | MH916802.1 Zika virus strain ZIKV/Homo sapiens/PRI/PRVABC59_17/2015, complete genome |
| 108 | MH916803.1 Zika virus strain ZIKV/Homo sapiens/PRI/PRVABC59_1/2015, complete genome |
| 109 | MH916806.1 Zika virus strain ZIKV/Homo sapiens/PRI/PRVABC59_8/2015, complete genome |
| 110 | MF510857.1 Zika virus isolate Zika virus/Aedes taylori/Senegal/1984/DakAr41667, complete |
| | genome |
| 111 | MH513598.1 Zika virus isolate BR/Sinop/H355/2015, complete genome |
| 112 | MH513599.1 Zika virus isolate BR/Sinop/H366/2015, complete genome |
| 113 | MH513600.1 Zika virus isolate BR/Sinop/H366 2P/2015, complete genome |
| 114 | MH544701.2 Zika virus isolate 459148_Meta_Colombia_2016, complete genome |
| 115 | MF996804.1 Zika virus isolate SI-BKK02, complete genome |
| 116 | MG548660.1 Zika virus isolate BKK03, complete genome |
| 117 | MG548661.1 Zika virus isolate BKK04, complete genome |
| 118 | MG807646.1 Zika virus isolate SI-BKK05, complete genome |
| 119 | MG807647.1 Zika virus isolate SI-BKK06, complete genome |
| 120 | MH013290.1 Zika virus isolate BKK07, complete genome |
| 121 | MF073357.1 Zika virus isolate 16288, complete genome |
| 122 | MF073358.1 Zika virus isolate 15261, complete genome |
| 123 | MF073359.1 Zika virus isolate 15098, complete genome |
| 124 | MG758785.1 Zika virus isolate 41525, complete genome |
| 125 | MG758786.1 Zika virus isolate 41525, complete genome |
| 126 | MH158236.1 Zika virus isolate FSS13025, complete genome |
| 127 | MH158237.1 Zika virus isolate PRVABC59, complete genome |
| 128 | MH130094.1 Zika virus strain ZIKV/Macaca mulatta/UGA/MR-766-VEROE6-AC4-P12_05/1947, |
| | complete genome |
| 129 | MH130095.1 Zika virus strain ZIKV/Macaca mulatta/UGA/MR-766-VEROE6-AC4-P12_07/1947, |
| | complete genome |
| 130 | MH130096.1 Zika virus strain ZIKV/Macaca mulatta/UGA/MR-766-VEROE6-AC10- |
| | P12_05/1947, complete genome |
| 131 | MH130097.1 Zika virus strain ZIKV/Macaca mulatta/UGA/MR-766-VEROE6-AC10- |
| | P12_03/1947, complete genome |
| 132 | MH130098.1 Zika virus strain ZIKV/Macaca mulatta/UGA/MR-766-VEROE6-AC10- |
| | P12_01/1947, complete genome |
| 133 | MH130099.1 Zika virus strain ZIKV/Macaca mulatta/UGA/MR-766-VEROE6-AC4-P12_02/1947, |
| | complete genome |
| 134 | MH130100.1 Zika virus strain ZIKV/Macaca mulatta/UGA/MR-766-VEROE6-AC4-P12_01/1947, |
| | complete genome |
| 135 | MH130101.1 Zika virus strain ZIKV/Macaca mulatta/UGA/MR-766-VEROE6-AC4-P12_08/1947, |
| | complete genome |
| 136 | MH130102.1 Zika virus strain ZIKV/Macaca mulatta/UGA/MR-766-VEROE6-AC10- |
| | P12_02/1947, complete genome |
| 137 | MH130103.1 Zika virus strain ZIKV/Macaca mulatta/UGA/MR-766-VEROE6-AC10- |
| | P12_06/1947, complete genome |
| 138 | MH130104.1 Zika virus strain ZIKV/Macaca mulatta/UGA/MR-766-VEROE6-AC10- |
| | P12_07/1947, complete genome |
| 139 | MH130105.1 Zika virus strain ZIKV/Macaca mulatta/UGA/MR-766-VEROE6-AC10- |
| | P12_04/1947, complete genome |
| 140 | MH130106.1 Zika virus strain ZIKV/Macaca mulatta/UGA/MR-766-VEROE6-AC10- |
| | P12_08/1947, complete genome |
| 141 | MH130107.1 Zika virus strain ZIKV/Macaca mulatta/UGA/MR-766-VEROE6-AC4-P12_03/1947, |
| | complete genome |
| 142 | MH130108.1 Zika virus strain ZIKV/Macaca mulatta/UGA/MR-766-VEROE6-AC4-P12_04/1947, |
| | complete genome |
| 143 | MH130109.1 Zika virus strain ZIKV/Macaca mulatta/UGA/MR-766-VEROE6-AC4-P12_06/1947, |
| | complete genome |
| 144 | MH157202.1 Zika virus strain ZIKV/Homo sapiens/MEX/41-017-F_V3_O/2016, complete |
| | genome |
| 145 | MH157208.1 Zika virus strain ZIKV/Homo sapiens/MEX/41-022-F_V0_O/2016, complete |
| | genome |
| 146 | MH157213.1 Zika virus strain ZIKV/Homo sapiens/MEX/41-001-F_V3_O/2016, complete |
| | genome |
| 147 | MH119185.1 Zika virus isolate DMSc05684-16, complete genome |
| 148 | MH061852.1 Zika virus strain ZIKV/Macaca mulatta/UGA/MR-766-VEROE6-AC11-P5_08/1947, |
| | complete genome |
| 149 | MH061853.1 Zika virus strain ZIKV/Macaca mulatta/UGA/MR-766-VEROE6-GD12- |
| | P10_04/1947, complete genome |
| 150 | MH061854.1 Zika virus strain ZIKV/Macaca mulatta/UGA/MR-766-VEROE6-AC11-P5_06/1947, |
| | complete genome |
| 151 | MH061855.1 Zika virus strain ZIKV/Macaca mulatta/UGA/MR-766-VEROE6-FA12-P7_03/1947, |
| | complete genome |
| 152 | MH061856.1 Zika virus strain ZIKV/Macaca mulatta/UGA/MR-766-VEROE6-FC3-P8_03/1947, |
| | complete genome |
| 153 | MH061857.1 Zika virus strain ZIKV/Macaca mulatta/UGA/MR-766-VEROE6-AC11-P5_07/1947, |
| | complete genome |
| 154 | MH061858.1 Zika virus strain ZIKV/Macaca mulatta/UGA/MR-766-VEROE6-FC11-P7_05/1947, |
| | complete genome |
| 155 | MH061859.1 Zika virus strain ZIKV/Macaca mulatta/UGA/MR-766-VEROE6-AC11-P5_01/1947, |
| | complete genome |
| 156 | MH061860.1 Zika virus strain ZIKV/Macaca mulatta/UGA/MR-766-VEROE6-FC11-P7_06/1947, |
| | complete genome |
| 157 | MH061861.1 Zika virus strain ZIKV/Macaca mulatta/UGA/MR-766-VEROE6-GA3-P10_08/1947, |
| | complete genome |
| 158 | MH061862.1 Zika virus strain ZIKV/Macaca mulatta/UGA/MR-766-VEROE6-GD12- |
| | P10_01/1947, complete genome |
| 159 | MH061863.1 Zika virus strain ZIKV/Macaca mulatta/UGA/MR-766-VEROE6-FA12-P7_02/1947, |
| | complete genome |
| 160 | MH061864.1 Zika virus strain ZIKV/Macaca mulatta/UGA/MR-766-VEROE6-FA12-P7_07/1947, |
| | complete genome |
| 161 | MH061865.1 Zika virus strain ZIKV/Macaca mulatta/UGA/MR-766-VEROE6-AA1-P8_02/1947, |
| | complete genome |
| 162 | MH061866.1 Zika virus strain ZIKV/Macaca mulatta/UGA/MR-766-VEROE6-GD12- |
| | P10_07/1947, complete genome |
| 163 | MH061867.1 Zika virus strain ZIKV/Macaca mulatta/UGA/MR-766-VEROE6-GA3-P10_04/1947, |
| | complete genome |
| 164 | MH061868.1 Zika virus strain ZIKV/Macaca mulatta/UGA/MR-766-VEROE6-AA1-P8_07/1947, |
| | complete genome |
| 165 | MH061869.1 Zika virus strain ZIKV/Macaca mulatta/UGA/MR-766-VEROE6-AA1-P8_06/1947, |
| | complete genome |
| 166 | MH061870.1 Zika virus strain ZIKV/Macaca mulatta/UGA/MR-766-VEROE6-AC11-P5_05/1947, |
| | complete genome |
| 167 | MH061871.1 Zika virus strain ZIKV/Macaca mulatta/UGA/MR-766-VEROE6-FC11-P7_04/1947, |
| | complete genome |
| 168 | MH061872.1 Zika virus strain ZIKV/Macaca mulatta/UGA/MR-766-VEROE6-AA1-P8_05/1947, |
| | complete genome |
| 169 | MH061873.1 Zika virus strain ZIKV/Macaca mulatta/UGA/MR-766-VEROE6-FA12-P7_01/1947, |
| | complete genome |
| 170 | MH061874.1 Zika virus strain ZIKV/Macaca mulatta/UGA/MR-766-VEROE6-AA1-P8_03/1947, |
| | complete genome |
| 171 | MH061875.1 Zika virus strain ZIKV/Macaca mulatta/UGA/MR-766-VEROE6-AC11-P5_03/1947, |
| | complete genome |
| 172 | MH061876.1 Zika virus strain ZIKV/Macaca mulatta/UGA/MR-766-VEROE6-P12_07/1947, |
| | complete genome |
| 173 | MH061877.1 Zika virus strain ZIKV/Macaca mulatta/UGA/MR-766-VEROE6-FC11-P7_07/1947, |
| | complete genome |
| 174 | MH061878.1 Zika virus strain ZIKV/Macaca mulatta/UGA/MR-766-VEROE6-FC3-P8_05/1947, |
| | complete genome |
| 175 | MH061879.1 Zika virus strain ZIKV/Macaca mulatta/UGA/MR-766-VEROE6-GD12- |
| | P10_05/1947, complete genome |
| 176 | MH061880.1 Zika virus strain ZIKV/Macaca mulatta/UGA/MR-766-VEROE6-P12_08/1947, |
| | complete genome |
| 177 | MH061881.1 Zika virus strain ZIKV/Macaca mulatta/UGA/MR-766-VEROE6-GD12- |
| | P10_02/1947, complete genome |
| 178 | MH061882.1 Zika virus strain ZIKV/Macaca mulatta/UGA/MR-766-VEROE6-GD12- |
| | P10_08/1947, complete genome |
| 179 | MH061883.1 Zika virus strain ZIKV/Macaca mulatta/UGA/MR-766-VEROE6-FC11-P7_08/1947, |
| | complete genome |
| 180 | MH061884.1 Zika virus strain ZIKV/Macaca mulatta/UGA/MR-766-VEROE6-GA3-P10_01/1947, |
| | complete genome |
| 181 | MH061885.1 Zika virus strain ZIKV/Macaca mulatta/UGA/MR-766-VEROE6-FC3-P8_06/1947, |
| | complete genome |
| 182 | MH061886.1 Zika virus strain ZIKV/Macaca mulatta/UGA/MR-766-VEROE6-FA12-P7_05/1947, |
| | complete genome |
| 183 | MH061887.1 Zika virus strain ZIKV/Macaca mulatta/UGA/MR-766-VEROE6-P12_05/1947, |
| | complete genome |
| 184 | MH061888.1 Zika virus strain ZIKV/Macaca mulatta/UGA/MR-766-VEROE6-AC11-P5_02/1947, |
| | complete genome |
| 185 | MH061889.1 Zika virus strain ZIKV/Macaca mulatta/UGA/MR-766-VEROE6-FC3-P8_07/1947, |
| | complete genome |
| 186 | MH061890.1 Zika virus strain ZIKV/Macaca mulatta/UGA/MR-766-VEROE6-FC3-P8_08/1947, |
| | complete genome |
| 187 | MH061891.1 Zika virus strain ZIKV/Macaca mulatta/UGA/MR-766-VEROE6-FA12-P7_06/1947, |
| | complete genome |
| 188 | MH061892.1 Zika virus strain ZIKV/Macaca mulatta/UGA/MR-766-VEROE6-P12_03/1947, |
| | complete genome |
| 189 | MH061893.1 Zika virus strain ZIKV/Macaca mulatta/UGA/MR-766-VEROE6-GD12- |
| | P10_03/1947, complete genome |
| 190 | MH061894.1 Zika virus strain ZIKV/Macaca mulatta/UGA/MR-766-VEROE6-FC11-P7_03/1947, |
| | complete genome |
| 191 | MH061895.1 Zika virus strain ZIKV/Macaca mulatta/UGA/MR-766-VEROE6-P12_01/1947, |
| | complete genome |
| 192 | MH061896.1 Zika virus strain ZIKV/Macaca mulatta/UGA/MR-766-VEROE6-FC3-P8_04/1947, |
| | complete genome |
| 193 | MH061897.1 Zika virus strain ZIKV/Macaca mulatta/UGA/MR-766-VEROE6-FC3-P8_01/1947, |
| | complete genome |
| 194 | MH061898.1 Zika virus strain ZIKV/Macaca mulatta/UGA/MR-766-VEROE6-FC11-P7_02/1947, |
| | complete genome |
| 195 | MH061899.1 Zika virus strain ZIKV/Macaca mulatta/UGA/MR-766-VEROE6-AA1-P8_08/1947, |
| | complete genome |
| 196 | MH061900.1 Zika virus strain ZIKV/Macaca mulatta/UGA/MR-766-VEROE6-P12_04/1947, |
| | complete genome |
| 197 | MH061901.1 Zika virus strain ZIKV/Macaca mulatta/UGA/MR-766-VEROE6-GA3-P10_07/1947, |
| | complete genome |
| 198 | MH061902.1 Zika virus strain ZIKV/Macaca mulatta/UGA/MR-766-VEROE6-FA12-P7_08/1947, |
| | complete genome |
| 199 | MH061903.1 Zika virus strain ZIKV/Macaca mulatta/UGA/MR-766-VEROE6-AA1-P8_04/1947, |
| | complete genome |
| 200 | MH061904.1 Zika virus strain ZIKV/Macaca mulatta/UGA/MR-766-VEROE6-FC3-P8_02/1947, |
| | complete genome |
| 201 | MH061905.1 Zika virus strain ZIKV/Macaca mulatta/UGA/MR-766-VEROE6-AA1-P8_01/1947, |
| | complete genome |
| 202 | MH061906.1 Zika virus strain ZIKV/Macaca mulatta/UGA/MR-766-VEROE6-FC11-P7_01/1947, |
| | complete genome |
| 203 | MH061907.1 Zika virus strain ZIKV/Macaca mulatta/UGA/MR-766-VEROE6-GA3-P10_06/1947, |
| | complete genome |
| 204 | MH061908.1 Zika virus strain ZIKV/Macaca mulatta/UGA/MR-766-VEROE6-P12_06/1947, |
| | complete genome |
| 205 | MH061909.1 Zika virus strain ZIKV/Macaca mulatta/UGA/MR-766-VEROE6-AC11-P5_04/1947, |
| | complete genome |
| 206 | MH061910.1 Zika virus strain ZIKV/Macaca mulatta/UGA/MR-766-VEROE6-FA12-P7_04/1947, |
| | complete genome |
| 207 | MH061911.1 Zika virus strain ZIKV/Macaca mulatta/UGA/MR-766-VEROE6-GD12- |
| | P10_06/1947, complete genome |
| 208 | MH061912.1 Zika virus strain ZIKV/Macaca mulatta/UGA/MR-766-VEROE6-GA3-P10_03/1947, |
| | complete genome |
| 209 | MH061913.1 Zika virus strain ZIKV/Macaca mulatta/UGA/MR-766-VEROE6-GA3-P10_05/1947, |
| | complete genome |
| 210 | MH061914.1 Zika virus strain ZIKV/Macaca mulatta/UGA/MR-766-VEROE6-GA3-P10_02/1947, |
| | complete genome |
| 211 | MH061915.1 Zika virus strain ZIKV/Macaca mulatta/UGA/MR-766-VEROE6-P12_02/1947, |
| | complete genome |
| 212 | LC369584.1 Zika virus ZIKV/Hu/Thai/KngSG/17-D501 genomic RNA, nearly complete genome |
| 213 | MG827392.1 Zika virus strain PF13/251013-18, complete genome |
| 214 | MG674718.1 Zika virus isolate ZKC2P4, complete genome |
| 215 | MG674719.1 Zika virus isolate ZKC2P6, complete genome |
| 216 | KY766069.1 Zika virus isolate Pf13/251013-18, complete genome |
| 217 | MF794971.1 Zika virus strain ZIKV/EC/Esmeraldas/121/2016, complete genome |
| 218 | KY553111.1 Zika virus isolate AFMC-U, complete genome |
| 219 | MF384325.1 Zika virus isolate mosquito/Haiti/1682/2016, complete genome |
| 220 | MF352141.1 Zika virus isolate PE243, complete genome |
| 221 | KY415986.1 Zika virus isolate Haiti/0029/2014, complete genome |
| 222 | KY415987.1 Zika virus isolate Haiti/0033/2014, complete genome |
| 223 | KY415988.1 Zika virus isolate Haiti/0054/2014, complete genome |
| 224 | KY415989.1 Zika virus isolate Haiti/0074/2014, complete genome |
| 225 | KY415990.1 Zika virus isolate Haiti/0036/2014, complete genome |
| 226 | KY415991.1 Zika virus isolate Haiti/0097/2014, complete genome |
| 227 | KY989511.1 Zika virus strain MR 766, complete genome |
| 228 | KY989971.1 Zika virus isolate FLA, complete genome |
| 229 | KX051560.1 Zika virus isolate SK364/13AS, complete genome |
| 230 | KX051561.1 Zika virus isolate SK403/13AS, complete genome |
| 231 | KX051562.1 Zika virus isolate SV0010/15, complete genome |
| 232 | KY765317.1 Zika virus strain ZIKV/Homo sapiens/NIC/7252_12A1/2016, complete genome |
| 233 | KY765318.1 Zika virus strain ZIKV/Homo sapiens/NIC/4886_12A1/2016, complete genome |
| 234 | KY765320.1 Zika virus strain ZIKV/Homo sapiens/NIC/6406_13A1_SP/2016, complete genome |
| 235 | KY765321.1 Zika virus strain ZIKV/Homo sapiens/NIC/4886_12A1_SP/2016, complete genome |
| 236 | KY765322.1 Zika virus strain ZIKV/Homo sapiens/NIC/7252_12A1_SP/2016, complete genome |
| 237 | KY765323.1 Zika virus strain ZIKV/Homo sapiens/NIC/6188_13A1/2016, complete genome |
| 238 | KY765324.1 Zika virus strain ZIKV/Homo sapiens/NIC/8610_13A1/2016, complete genome |
| 239 | KY765325.1 Zika virus strain ZIKV/Homo sapiens/NIC/5005_13A1/2016, complete genome |
| 240 | KY765326.1 Zika virus strain ZIKV/Homo sapiens/NIC/6188_13A1_SP/2016, complete genome |
| 241 | KY765327.1 Zika virus strain ZIKV/Homo sapiens/NIC/5005_13A1_SP/2016, complete genome |
| 242 | KY631493.1 Zika virus isolate MEX_ENCB165, complete genome |
| 243 | KY631494.1 Zika virus isolate MEX_ENCB165P4, complete genome |
| 244 | LC219720.1 Zika virus genomic RNA, complete genome, strain: ZIKV/Hu/NIID123/2016 |
| 245 | KY648934.1 Zika virus strain ZIKV/Aedes aegypti/MEX/MEX_I-44/2016, complete genome |
| 246 | KX827268.1 Zika virus strain ZIKV/Homo sapiens/USA/UT-1/2016, complete genome |
| 247 | KY348640.1 Zika virus strain SL1602, complete genome |
| 248 | KU761560.1 Zika virus isolate ZJ03, complete genome |
| 249 | KU761561.1 Zika virus isolate ZJ02, complete genome |
| 250 | KY272991.1 Zika virus isolate RIO-BM1, complete genome |
| 251 | KY288905.1 Zika virus strain MP1751, complete genome |
| 252 | KY328289.1 Zika virus isolate HN16, complete genome |
| 253 | KY272987.1 Zika virus isolate SI-BKK01, complete genome |
| 254 | KY120348.1 Zika virus strain MEX_CIENI551P4, complete genome |
| 255 | KY120349.2 Zika virus strain MEX_CIENI551, complete genome |
| 256 | KX269878.1 Zika virus isolate Haiti/2016/PD, complete genome |
| 257 | LC191864.1 Zika virus genomic RNA, complete genome, strain: ZIKV/Hu/Chiba/S36/2016 |
| 258 | LC190723.1 Zika virus genomic RNA, complete genome, strain: ZIKV/Hu/Yokohama/1/2016 |
| 259 | KX893855.1 Zika virus strain Zika virus/Homo sapiens/VEN/UF-2/2016, complete genome |
| 260 | KX879603.1 Zika virus strain ZIKV/EC/Esmeraldas/062/2016, complete genome |
| 261 | KX879604.1 Zika virus strain ZIKV/EC/Esmeraldas/089/2016, complete genome |
| 262 | KX830960.1 Zika virus culture ATCC: VR-84 isolate MR776, complete genome |
| 263 | KX811222.1 Zika virus isolate Brazil_2015_MG, complete genome |
| 264 | KX856011.1 Zika virus strain ZIKV/Aedes sp./MEX_I-44/2016, complete genome |
| 265 | KX197205.1 Zika virus isolate 9, complete genome |
| 266 | KX806557.3 Zika virus isolate TS17-2016, complete genome |
| 267 | KX766028.1 Zika virus isolate R114916, complete genome |
| 268 | KX766029.1 Zika virus isolate R116265, complete genome |
| 269 | KX702400.1 Zika virus strain Zika virus/Homo sapiens/VEN/UF-1/2016, complete genome |
| 270 | KX694532.2 Zika virus strain ZIKV/Homo sapiens/THA/PLCal_ZV/2013, complete genome |
| 271 | KX694533.2 Zika virus strain ZIKV/Aedes aegypti/MYS/P6-740/1966, complete genome |
| 272 | KX694534.2 Zika virus strain ZIKV/Homo sapiens/HND/R103451/2015, complete genome |
| 273 | KX673530.1 Zika virus isolate PHE_semen_Guadeloupe, complete genome |
| 274 | KX266255.1 Zika virus isolate ZIKV_SMGC-1, complete genome |
| 275 | KX601166.2 Zika virus strain ZIKV/Aedes africanus/SEN/DakAr41524/1984, complete genome |
| 276 | KX601167.1 Zika virus strain ZIKV/Aedes sp./MYS/P6-740/1966, complete genome |
| 277 | KX601168.1 Zika virus strain ZIKV/Homo sapiens/PRI/PRVABC59/2015, complete genome |
| 278 | KX601169.1 Zika virus strain ZIKV/Macaca mulatta/UGA/MR-766/1947, complete genome |
| 279 | KX369547.1 Zika virus strain PF13/251013-18, complete genome |
| 280 | KX446950.2 Zika virus strain ZIKV/Aedes. sp/MEX/MEX_2-81/2016, complete genome |
| 281 | KX446951.2 Zika virus strain ZIKV/Aedes. sp/MEX/MEX_I-7/2016, complete genome |
| 282 | KX377335.1 Zika virus strain MR-766, complete genome |
| 283 | KX377336.1 Zika virus strain P6-740, complete genome |
| 284 | KX377337.1 Zika virus strain PRVABC-59, complete genome |
| 285 | KX280026.1 Zika virus isolate Paraiba_01, complete genome |
| 286 | KX262887.1 Zika virus isolate 103451, complete genome |
| 287 | KX253996.1 Zika virus isolate ZKC2/2016, complete genome |
| 288 | KX247646.1 Zika virus isolate Zika virus/Homo sapiens/COL/UF-1/2016, complete genome |
| 289 | KX197192.1 Zika virus isolate ZIKV/H. sapiens/Brazil/PE243/2015, complete genome |
| 290 | KX198134.2 Zika virus strain ZIKV/Aedes africanus/SEN/DAK-AR-41524_A1C1-V2/1984, |
| | complete genome |
| 291 | KX198135.2 Zika virus strain ZIKV/Homo sapiens/PAN/BEI-259634_V4/2016, complete |
| | genome |
| 292 | KX156774.2 Zika virus strain ZIKV/Homo sapiens/PAN/CDC-259359_V1-V3/2015, complete |
| | genome |
| 293 | KX156775.2 Zika virus strain ZIKV/Homo sapiens/PAN/CDC-259249_V1-V3/2015, complete |
| | genome |
| 294 | KX156776.2 Zika virus strain ZIKV/Homo sapiens/PAN/CDC-259364_V1-V2/2015, complete |
| | genome |
| 295 | KX117076.1 Zika virus isolate Zhejiang04, complete genome |
| 296 | KX087101.3 Zika virus strain ZIKV/Homo sapiens/PRI/PRVABC59/2015, complete genome |
| 297 | KX087102.2 Zika virus strain ZIKV/Homo sapiens/COL/FLR/2015, complete genome |
| 298 | KX051563.1 Zika virus isolate Haiti/1/2016, complete genome |
| 299 | KU955591.1 Zika virus isolate Zika virus/A. africanus-tc/SEN/1984/41525-DAK, complete |
| | genome |
| 300 | KU955592.1 Zika virus isolate Zika virus/A. taylori-tc/SEN/1984/41662-DAK, complete genome |
| 301 | KU955593.1 Zika virus isolate Zika virus/H. sapiens-tc/KHM/2010/FSS13025, complete genome |
| 302 | KU955594.1 Zika virus isolate Zika virus/M. mulatta-tc/UGA/1947/MR-766, complete genome |
| 303 | KU955595.1 Zika virus isolate Zika virus/A. taylori-tc/SEN/1984/41671-DAK, complete genome |
| 304 | KU870645.1 Zika virus isolate FB-GWUH-2016, complete genome |
| 305 | KU926309.2 Zika virus isolate Rio-U1, complete genome |
| 306 | KU926310.2 Zika virus isolate Rio-S1, complete genome |
| 307 | KU922923.1 Zika virus isolate MEX/InDRE/Lm/2016, complete genome |
| 308 | KU922960.1 Zika virus isolate MEX/InDRE/Sm/2016, complete genome |
| 309 | KU853012.1 Zika virus isolate Dominican Republic/2016/PD1, complete genome |
| 310 | KU853013.1 Zika virus isolate Dominican Republic/2016/PD2, complete genome |
| 311 | KU820899.2 Zika virus isolate ZJ03, complete genome |
| 312 | KU744693.1 Zika virus isolate VE_Ganxian, complete genome |
| 313 | KU497555.1 Zika virus isolate Brazil-ZKV2015, complete genome |
| 314 | KU707826.1 Zika virus isolate SSABR1, complete genome |
| 315 | KU527068.1 Zika virus strain Natal RGN, complete genome |
| 316 | KU681081.3 Zika virus isolate Zika virus/H. sapiens-tc/THA/2014/SV0127- 14, complete |
| | genome |
| 317 | KU681082.3 Zika virus isolate Zika virus/H. sapiens-tc/PHL/2012/CPC-0740, complete genome |
| 318 | KU509998.3 Zika virus strain Haiti/1225/2014, complete genome |
| 319 | KU501215.1 Zika virus strain PRVABC59, complete genome |
| 320 | KU321639.1 Zika virus strain ZikaSPH2015, complete genome |
| 321 | LC002520.1 Zika virus genomic RNA, complete genome, strain: MR766-NIID |
| 322 | KJ776791.2 Zika virus strain H/PF/2013, complete genome |
| 323 | AY632535.2 Zika virus strain MR 766, complete genome |

TABLE 1C
Non-limiting example Zika 5′ UTR sequences

| SEQ | |
|---|---|
| ID NO | Zika viruses with example 5′ UTRs |
| 324 | >NC_035889.1 Zika virus isolate ZIKV/H. sapiens/Brazil/Natal/2015, complete genome |
| 325 | >NC_012532.1 Zika virus, complete genome |
| 326 | >OL450364.1 Zika virus isolate ZIKV/Haiti/1238/2015, complete genome |
| 327 | >OL450365.1 Zika virus isolate ZIKV/Haiti/0478/2015, complete genome |
| 328 | >OL450366.1 Zika virus isolate ZIKV/Haiti/1332/2015, complete genome |
| 329 | >OL414716.1 Zika virus isolate 15555, complete genome |
| 330 | >OK571913.1 Zika virus isolate Homo sapiens/Haiti/0728/2014, complete genome |
| 331 | >OK054351.1 Zika virus isolate 211784, complete genome |
| 332 | >MT377491.1 Zika virus isolate MU-DMSC-1/2017, complete genome |
| 333 | >MT377492.1 Zika virus isolate MU-DMSC-1/2016, complete genome |
| 334 | >MT377493.1 Zika virus isolate MU-DMSC-2/2017, complete genome |
| 335 | >MT377494.1 Zika virus isolate MU-DMSC-3/2017, complete genome |
| 336 | >MT377495.1 Zika virus isolate MU-DMSC-4/2017, complete genome |
| 337 | >MT377496.1 Zika virus isolate MU-DMSC-2/2016, complete genome |
| 338 | >MT377497.1 Zika virus isolate MU-DMSC-3/2016, complete genome |
| 339 | >MT377498.1 Zika virus isolate MU-DMSC-4/2016, complete genome |
| 340 | >MT377499.1 Zika virus isolate MU-DMSC-5/2016, complete genome |
| 341 | >MT377500.1 Zika virus isolate MU-DMSC-6/2016, complete genome |
| 342 | >MT377501.1 Zika virus isolate MU-DMSC-5/2017, complete genome |
| 343 | >MT377502.1 Zika virus isolate NS-274/2006, complete genome |
| 344 | >MT377503.1 Zika virus isolate 15-1144, complete genome |
| 345 | >MT377504.1 Zika virus isolate NS-110/2006, complete genome |
| 346 | >MZ008356.1 Zika virus isolate ZIKV/Homo_{—}sapiens/Cambodia/2019/SZ1901, complete genome |
| 347 | >MW143022.1 Zika virus strain MR766, complete genome |
| 348 | >MW680969.1 Zika virus isolate rGZ02a/2018, complete genome |
| 349 | >MW680970.1 Zika virus isolate rGZ02p/2018, complete genome |
| 350 | >MW015936.1 Zika virus isolate Zika virus/H. sapiens-tc/THA/2006/CVD_06-020, complete genome |
| 351 | >MN101548.1 Zika virus isolate Salvador, complete genome |
| 352 | >MT505349.1 Mutant Zika virus isolate DK, complete genome |
| 353 | >MT505350.1 Mutant Zika virus isolate DK23, complete genome |
| 354 | >MT636065.1 Zika virus isolate ARCB116141, complete genome |
| 355 | >MT483911.1 Zika virus isolate 800/16, complete genome |
| 356 | >MT507047.1 Zika virus isolate S-542/Yucatan/2017, complete genome |
| 357 | >MT507048.1 Zika virus isolate S-542/Yucatan/2017 clone 6C, complete genome |
| 358 | >MT507049.1 Zika virus isolate S-542/Yucatan/2017 clone 6V, complete genome |
| 359 | >MT507050.1 Zika virus isolate S-542/Yucatan/2017 clone 6A, complete genome |
| 360 | >MK566202.1 Zika virus isolate 15098, complete genome |
| 361 | >MK241415.1 Zika virus isolate ZIKV/Homo_{—}sapiens/CPV/2015/CV448c, complete genome |
| 362 | >MK241416.1 Zika virus isolate ZIKV/Homo_{—}sapiens/CPV/2015/CV487, complete genome |
| 363 | >MK241417.1 Zika virus isolate ZIKV/Homo_{—}sapiens/CPV/2016/CV907u, complete genome |
| 364 | >MN611472.1 Zika virus isolate 2019YNZIKV02, complete genome |
| 365 | >MN566104.1 Zika virus isolate Haiti/0011/2016, complete genome |
| 366 | >MN566105.1 Zika virus isolate Haiti/0375/2016, complete genome |
| 367 | >MN566106.1 Zika virus isolate Haiti/0395/2016, complete genome |
| 368 | >MN566107.1 Zika virus isolate Haiti/0165/2016, complete genome |
| 369 | >MN566108.1 Zika virus isolate Haiti/0866/2016, complete genome |
| 370 | >MN577543.1 Zika virus isolate Haiti/1327/2014, complete genome |
| 371 | >MN577544.1 Zika virus isolate Haiti/0148/2016, complete genome |
| 372 | >MN577550.1 Zika virus isolate ZIKV-Nicaragua/2016-UCB7420, complete genome |
| 373 | >MN100039.1 Zika virus isolate ZIKV/Homo sapiens/PAN/CDC-259249_V1-V3/2015, complete |
| | genome |
| 374 | >MN124090.1 Zika virus isolate ZIKV/Homo sapiens/PAN/CDC-259249_V1-V3/2015, complete |
| | genome |
| 375 | >MN124091.1 Zika virus isolate ZIKV/Homo sapiens/PAN/CDC-259249_V1-V3/2015, complete |
| | genome |
| 376 | >MH675619.1 Zika virus isolate CTS-30-16p, complete genome |
| 377 | >MH675620.1 Zika virus isolate CTS-36-16p, complete genome |
| 378 | >MH675621.1 Zika virus isolate CTS-47-16p, complete genome |
| 379 | >MH675622.1 Zika virus isolate CTS-50-16p, complete genome |
| 380 | >MH675623.1 Zika virus isolate CTS-56-16p, complete genome |
| 381 | >MH675624.1 Zika virus isolate CTS-61-16p, complete genome |
| 382 | >MH675625.1 Zika virus isolate CTS-178-16p, complete genome |
| 383 | >MH675626.1 Zika virus isolate CTS-183-16p, complete genome |
| 384 | >MH675627.1 Zika virus isolate CTS-193-16p, complete genome |
| 385 | >MH675628.1 Zika virus isolate CTS-223-16p, complete genome |
| 386 | >MH675629.1 Zika virus isolate QTX-02, complete genome |
| 387 | >MH675630.1 Zika virus isolate QTX-04, complete genome |
| 388 | >MN025403.1 Zika virus isolate 15555, complete genome |
| 389 | >MK713748.1 Zika virus isolate PRVABC59, complete genome |
| 390 | >MH900227.1 Zika virus isolate 31N, complete genome |
| 391 | >MH882527.1 Zika virus isolate Zika virus/H. sapiens-wt/BRA/2016/ZKV17Asem_2016-04-26, |
| | complete genome |
| 392 | >MH882528.1 Zika virus isolate Zika virus/H. sapiens-wt/BRA/2016/ZKV17Auri_2016-04-26, |
| | complete genome |
| 393 | >MH882529.1 Zika virus isolate Zika virus/H. sapiens-wt/BRA/2016/ZKV17Bsem_2016-05-03, |
| | complete genome |
| 394 | >MH882530.1 Zika virus isolate Zika virus/H. sapiens-wt/BRA/2016/ZKV17Csem_2016-05-10, |
| | complete genome |
| 395 | >MH882531.1 Zika virus isolate Zika virus/H. sapiens-wt/BRA/2016/ZKV17Dsem_2016-05-17, |
| | complete genome |
| 396 | >MH882532.1 Zika virus isolate Zika virus/H. sapiens-wt/BRA/2016/ZKV17Esem_2016-05-24, |
| | complete genome |
| 397 | >MH882533.1 Zika virus isolate Zika virus/H. sapiens-wt/BRA/2016/ZKV17Fsem_2016-05-31, |
| | complete genome |
| 398 | >MH882534.1 Zika virus isolate Zika virus/H. sapiens-wt/BRA/2016/ZKV17Gsem_2016-06-08, |
| | complete genome |
| 399 | >MH882535.1 Zika virus isolate Zika virus/H. sapiens-wt/BRA/2016/ZKV17Hsem_2016-06-16, |
| | complete genome |
| 400 | >MH882536.1 Zika virus isolate Zika virus/H. sapiens-wt/BRA/2016/ZKV17Jsem_2016-06-28, |
| | complete genome |
| 401 | >MH882538.1 Zika virus isolate Zika virus/H. sapiens-wt/BRA/2016/ZKV17Lsem_2016-07-12, |
| | complete genome |
| 402 | >MH882539.1 Zika virus isolate Zika virus/H. sapiens-wt/BRA/2016/ZKV17Msem_2016-07-19, |
| | complete genome |
| 403 | >MH882540.1 Zika virus isolate Zika virus/H. sapiens-wt/BRA/2016/ZKV17Nsem_2016-07-27, |
| | complete genome |
| 404 | >MH882541.1 Zika virus isolate Zika virus/H. sapiens-wt/BRA/2016/ZKV17sem_2016-04-19, |
| | complete genome |
| 405 | >MH882542.1 Zika virus isolate Zika virus/H. sapiens-wt/BRA/2016/ZKV17uri_2016-04-19, |
| | complete genome |
| 406 | >MH882543.1 Zika virus isolate Zika virus/H. sapiens-wt/BRA/2016/ZKV19Auri_2016-05-05, |
| | complete genome |
| 407 | >MH882544.1 Zika virus isolate Zika virus/H. sapiens-wt/BRA/2016/ZKV19Bsem_2016-05-12, |
| | complete genome |
| 408 | >MH882545.1 Zika virus isolate Zika virus/H. sapiens-wt/BRA/2016/ZKV19Csem_2016-05-19, |
| | complete genome |
| 409 | >MH882546.1 Zika virus isolate Zika virus/H. sapiens-wt/BRA/2016/ZKV19Dsem_2016-05-24, |
| | complete genome |
| 410 | >MH882547.1 Zika virus isolate Zika virus/H. sapiens-wt/BRA/2016/ZKV19Esem_2016-06-02, |
| | complete genome |
| 411 | >MH882548.1 Zika virus isolate Zika virus/H. sapiens-wt/BRA/2016/ZKV19Fsem_2016-06-09, |
| | complete genome |
| 412 | >MK105975.1 Zika virus strain MR766, complete genome |
| 413 | >MF783072.1 Zika virus strain Zika virus/mosquito/Haiti/1855/2016, complete genome |
| 414 | >MF783073.1 Zika virus strain Zika virus/mosquito/Haiti/1919/2016, complete genome |
| 415 | >MG770187.1 Zika virus isolate SV0127-14, complete genome |
| 416 | >MG770188.1 Zika virus isolate SV0127-14, complete genome |
| 417 | >MH916802.1 Zika virus strain ZIKV/Homo sapiens/PRI/PRVABC59_17/2015, complete genome |
| 418 | >MH916803.1 Zika virus strain ZIKV/Homo sapiens/PRI/PRVABC59_1/2015, complete genome |
| 419 | >MH916806.1 Zika virus strain ZIKV/Homo sapiens/PRI/PRVABC59_8/2015, complete genome |
| 420 | >MF510857.1 Zika virus isolate Zika virus/Aedes taylori/Senegal/1984/DakAr41667, complete |
| | genome |
| 421 | >MH513598.1 Zika virus isolate BR/Sinop/H355/2015, complete genome |
| 422 | >MH513599.1 Zika virus isolate BR/Sinop/H366/2015, complete genome |
| 423 | >MH513600.1 Zika virus isolate BR/Sinop/H366 2P/2015, complete genome |
| 424 | >MH544701.2 Zika virus isolate 459148_Meta_Colombia_2016, complete genome |
| 425 | >MF996804.1 Zika virus isolate SI-BKK02, complete genome |
| 426 | >MG548660.1 Zika virus isolate BKK03, complete genome |
| 427 | >MG548661.1 Zika virus isolate BKK04, complete genome |
| 428 | >MG807646.1 Zika virus isolate SI-BKK05, complete genome |
| 429 | >MG807647.1 Zika virus isolate SI-BKK06, complete genome |
| 430 | >MH013290.1 Zika virus isolate BKK07, complete genome |
| 431 | >MF073357.1 Zika virus isolate 16288, complete genome |
| 432 | >MF073358.1 Zika virus isolate 15261, complete genome |
| 433 | >MF073359.1 Zika virus isolate 15098, complete genome |
| 434 | >MG758785.1 Zika virus isolate 41525, complete genome |
| 435 | >MG758786.1 Zika virus isolate 41525, complete genome |
| 436 | >MH158236.1 Zika virus isolate FSS13025, complete genome |
| 437 | >MH158237.1 Zika virus isolate PRVABC59, complete genome |
| 438 | >MH130094.1 Zika virus strain ZIKV/Macaca mulatta/UGA/MR-766-VEROE6-AC4-P12_05/1947, |
| | complete genome |
| 439 | >MH130095.1 Zika virus strain ZIKV/Macaca mulatta/UGA/MR-766-VEROE6-AC4-P12_07/1947, |
| | complete genome |
| 440 | >MH130096.1 Zika virus strain ZIKV/Macaca mulatta/UGA/MR-766-VEROE6-AC10-P12_05/1947, |
| | complete genome |
| 441 | >MH130097.1 Zika virus strain ZIKV/Macaca mulatta/UGA/MR-766-VEROE6-AC10-P12_03/1947, |
| | complete genome |
| 442 | >MH130098.1 Zika virus strain ZIKV/Macaca mulatta/UGA/MR-766-VEROE6-AC10-P12_01/1947, |
| | complete genome |
| 443 | >MH130099.1 Zika virus strain ZIKV/Macaca mulatta/UGA/MR-766-VEROE6-AC4-P12_02/1947, |
| | complete genome |
| 444 | >MH130100.1 Zika virus strain ZIKV/Macaca mulatta/UGA/MR-766-VEROE6-AC4-P12_01/1947, |
| | complete genome |
| 445 | >MH130101.1 Zika virus strain ZIKV/Macaca mulatta/UGA/MR-766-VEROE6-AC4-P12_08/1947, |
| | complete genome |
| 446 | >MH130102.1 Zika virus strain ZIKV/Macaca mulatta/UGA/MR-766-VEROE6-AC10-P12_02/1947, |
| | complete genome |
| 447 | >MH130103.1 Zika virus strain ZIKV/Macaca mulatta/UGA/MR-766-VEROE6-AC10-P12_06/1947, |
| | complete genome |
| 448 | >MH130104.1 Zika virus strain ZIKV/Macaca mulatta/UGA/MR-766-VEROE6-AC10-P12_07/1947, |
| | complete genome |
| 449 | >MH130105.1 Zika virus strain ZIKV/Macaca mulatta/UGA/MR-766-VEROE6-AC10-P12_04/1947, |
| | complete genome |
| 450 | >MH130106.1 Zika virus strain ZIKV/Macaca mulatta/UGA/MR-766-VEROE6-AC10-P12_08/1947, |
| | complete genome |
| 451 | >MH130107.1 Zika virus strain ZIKV/Macaca mulatta/UGA/MR-766-VEROE6-AC4-P12_03/1947, |
| | complete genome |
| 452 | >MH130108.1 Zika virus strain ZIKV/Macaca mulatta/UGA/MR-766-VEROE6-AC4-P12_04/1947, |
| | complete genome |
| 453 | >MH130109.1 Zika virus strain ZIKV/Macaca mulatta/UGA/MR-766-VEROE6-AC4-P12_06/1947, |
| | complete genome |
| 454 | >MH157202.1 Zika virus strain ZIKV/Homo sapiens/MEX/41-017-F_V3_O/2016, complete genome |
| 455 | >MH157208.1 Zika virus strain ZIKV/Homo sapiens/MEX/41-022-F_V0_O/2016, complete genome |
| 456 | >MH157213.1 Zika virus strain ZIKV/Homo sapiens/MEX/41-001-F_V3_O/2016, complete genome |
| 457 | >MH119185.1 Zika virus isolate DMSc05684-16, complete genome |
| 458 | >MH061852.1 Zika virus strain ZIKV/Macaca mulatta/UGA/MR-766-VEROE6-AC11-P5_08/1947, |
| | complete genome |
| 459 | >MH061853.1 Zika virus strain ZIKV/Macaca mulatta/UGA/MR-766-VEROE6-GD12-P10_04/1947, |
| | complete genome |
| 460 | >MH061854.1 Zika virus strain ZIKV/Macaca mulatta/UGA/MR-766-VEROE6-AC11-P5_06/1947, |
| | complete genome |
| 461 | >MH061855.1 Zika virus strain ZIKV/Macaca mulatta/UGA/MR-766-VEROE6-FA12-P7_03/1947, |
| | complete genome |
| 462 | >MH061856.1 Zika virus strain ZIKV/Macaca mulatta/UGA/MR-766-VEROE6-FC3-P8_03/1947, |
| | complete genome |
| 463 | >MH061857.1 Zika virus strain ZIKV/Macaca mulatta/UGA/MR-766-VEROE6-AC11-P5_07/1947, |
| | complete genome |
| 464 | >MH061858.1 Zika virus strain ZIKV/Macaca mulatta/UGA/MR-766-VEROE6-FC11-P7_05/1947, |
| | complete genome |
| 465 | >MH061859.1 Zika virus strain ZIKV/Macaca mulatta/UGA/MR-766-VEROE6-AC11-P5_01/1947, |
| | complete genome |
| 466 | >MH061860.1 Zika virus strain ZIKV/Macaca mulatta/UGA/MR-766-VEROE6-FC11-P7_06/1947, |
| | complete genome |
| 467 | >MH061861.1 Zika virus strain ZIKV/Macaca mulatta/UGA/MR-766-VEROE6-GA3-P10_08/1947, |
| | complete genome |
| 468 | >MH061862.1 Zika virus strain ZIKV/Macaca mulatta/UGA/MR-766-VEROE6-GD12- |
| | P10_01/1947, complete genome |
| 469 | >MH061863.1 Zika virus strain ZIKV/Macaca mulatta/UGA/MR-766-VEROE6-FA12-P7_02/1947, |
| | complete genome |
| 470 | >MH061864.1 Zika virus strain ZIKV/Macaca mulatta/UGA/MR-766-VEROE6-FA12-P7_07/1947, |
| | complete genome |
| 471 | >MH061865.1 Zika virus strain ZIKV/Macaca mulatta/UGA/MR-766-VEROE6-AA1-P8_02/1947, |
| | complete genome |
| 472 | >MH061866.1 Zika virus strain ZIKV/Macaca mulatta/UGA/MR-766-VEROE6-GD12- |
| | P10_07/1947, complete genome |
| 473 | >MH061867.1 Zika virus strain ZIKV/Macaca mulatta/UGA/MR-766-VEROE6-GA3-P10_04/1947, |
| | complete genome |
| 474 | >MH061868.1 Zika virus strain ZIKV/Macaca mulatta/UGA/MR-766-VEROE6-AA1-P8_07/1947, |
| | complete genome |
| 475 | >MH061869.1 Zika virus strain ZIKV/Macaca mulatta/UGA/MR-766-VEROE6-AA1-P8_06/1947, |
| | complete genome |
| 476 | >MH061870.1 Zika virus strain ZIKV/Macaca mulatta/UGA/MR-766-VEROE6-AC11-P5_05/1947, |
| | complete genome |
| 477 | >MH061871.1 Zika virus strain ZIKV/Macaca mulatta/UGA/MR-766-VEROE6-FC11-P7_04/1947, |
| | complete genome |
| 478 | >MH061872.1 Zika virus strain ZIKV/Macaca mulatta/UGA/MR-766-VEROE6-AA1-P8_05/1947, |
| | complete genome |
| 479 | >MH061873.1 Zika virus strain ZIKV/Macaca mulatta/UGA/MR-766-VEROE6-FA12-P7_01/1947, |
| | complete genome |
| 480 | >MH061874.1 Zika virus strain ZIKV/Macaca mulatta/UGA/MR-766-VEROE6-AA1-P8_03/1947, |
| | complete genome |
| 481 | >MH061875.1 Zika virus strain ZIKV/Macaca mulatta/UGA/MR-766-VEROE6-AC11-P5_03/1947, |
| | complete genome |
| 482 | >MH061876.1 Zika virus strain ZIKV/Macaca mulatta/UGA/MR-766-VEROE6-P12_07/1947, |
| | complete genome |
| 483 | >MH061877.1 Zika virus strain ZIKV/Macaca mulatta/UGA/MR-766-VEROE6-FC11-P7_07/1947, |
| | complete genome |
| 484 | >MH061878.1 Zika virus strain ZIKV/Macaca mulatta/UGA/MR-766-VEROE6-FC3-P8_05/1947, |
| | complete genome |
| 485 | >MH061879.1 Zika virus strain ZIKV/Macaca mulatta/UGA/MR-766-VEROE6-GD12- |
| | P10_05/1947, complete genome |
| 486 | >MH061880.1 Zika virus strain ZIKV/Macaca mulatta/UGA/MR-766-VEROE6-P12_08/1947, |
| | complete genome |
| 487 | >MH061881.1 Zika virus strain ZIKV/Macaca mulatta/UGA/MR-766-VEROE6-GD12- |
| | P10_02/1947, complete genome |
| 488 | >MH061882.1 Zika virus strain ZIKV/Macaca mulatta/UGA/MR-766-VEROE6-GD12- |
| | P10_08/1947, complete genome |
| 489 | >MH061883.1 Zika virus strain ZIKV/Macaca mulatta/UGA/MR-766-VEROE6-FC11-P7_08/1947, |
| | complete genome |
| 490 | >MH061884.1 Zika virus strain ZIKV/Macaca mulatta/UGA/MR-766-VEROE6-GA3-P10_01/1947, |
| | complete genome |
| 491 | >MH061885.1 Zika virus strain ZIKV/Macaca mulatta/UGA/MR-766-VEROE6-FC3-P8_06/1947, |
| | complete genome |
| 492 | >MH061886.1 Zika virus strain ZIKV/Macaca mulatta/UGA/MR-766-VEROE6-FA12-P7_05/1947, |
| | complete genome |
| 493 | >MH061887.1 Zika virus strain ZIKV/Macaca mulatta/UGA/MR-766-VEROE6-P12_05/1947, |
| | complete genome |
| 494 | >MH061888.1 Zika virus strain ZIKV/Macaca mulatta/UGA/MR-766-VEROE6-AC11-P5_02/1947, |
| | complete genome |
| 495 | >MH061889.1 Zika virus strain ZIKV/Macaca mulatta/UGA/MR-766-VEROE6-FC3-P8_07/1947, |
| | complete genome |
| 496 | >MH061890.1 Zika virus strain ZIKV/Macaca mulatta/UGA/MR-766-VEROE6-FC3-P8_08/1947, |
| | complete genome |
| 497 | >MH061891.1 Zika virus strain ZIKV/Macaca mulatta/UGA/MR-766-VEROE6-FA12-P7_06/1947, |
| | complete genome |
| 498 | >MH061892.1 Zika virus strain ZIKV/Macaca mulatta/UGA/MR-766-VEROE6-P12_03/1947, |
| | complete genome |
| 499 | >MH061893.1 Zika virus strain ZIKV/Macaca mulatta/UGA/MR-766-VEROE6-GD12- |
| | P10_03/1947, complete genome |
| 500 | >MH061894.1 Zika virus strain ZIKV/Macaca mulatta/UGA/MR-766-VEROE6-FC11-P7_03/1947, |
| | complete genome |
| 501 | >MH061895.1 Zika virus strain ZIKV/Macaca mulatta/UGA/MR-766-VEROE6-P12_01/1947, |
| | complete genome |
| 502 | >MH061896.1 Zika virus strain ZIKV/Macaca mulatta/UGA/MR-766-VEROE6-FC3-P8_04/1947, |
| | complete genome |
| 503 | >MH061897.1 Zika virus strain ZIKV/Macaca mulatta/UGA/MR-766-VEROE6-FC3-P8_01/1947, |
| | complete genome |
| 504 | >MH061898.1 Zika virus strain ZIKV/Macaca mulatta/UGA/MR-766-VEROE6-FC11-P7_02/1947, |
| | complete genome |
| 505 | >MH061899.1 Zika virus strain ZIKV/Macaca mulatta/UGA/MR-766-VEROE6-AA1-P8_08/1947, |
| | complete genome |
| 506 | >MH061900.1 Zika virus strain ZIKV/Macaca mulatta/UGA/MR-766-VEROE6-P12_04/1947, |
| | complete genome |
| 507 | >MH061901.1 Zika virus strain ZIKV/Macaca mulatta/UGA/MR-766-VEROE6-GA3-P10_07/1947, |
| | complete genome |
| 508 | >MH061902.1 Zika virus strain ZIKV/Macaca mulatta/UGA/MR-766-VEROE6-FA12-P7_08/1947, |
| | complete genome |
| 509 | >MH061903.1 Zika virus strain ZIKV/Macaca mulatta/UGA/MR-766-VEROE6-AA1-P8_04/1947, |
| | complete genome |
| 510 | >MH061904.1 Zika virus strain ZIKV/Macaca mulatta/UGA/MR-766-VEROE6-FC3-P8_02/1947, |
| | complete genome |
| 511 | >MH061905.1 Zika virus strain ZIKV/Macaca mulatta/UGA/MR-766-VEROE6-AA1-P8_01/1947, |
| | complete genome |
| 512 | >MH061906.1 Zika virus strain ZIKV/Macaca mulatta/UGA/MR-766-VEROE6-FC11-P7_01/1947, |
| | complete genome |
| 513 | >MH061907.1 Zika virus strain ZIKV/Macaca mulatta/UGA/MR-766-VEROE6-GA3-P10_06/1947, |
| | complete genome |
| 514 | >MH061908.1 Zika virus strain ZIKV/Macaca mulatta/UGA/MR-766-VEROE6-P12_06/1947, |
| | complete genome |
| 515 | >MH061909.1 Zika virus strain ZIKV/Macaca mulatta/UGA/MR-766-VEROE6-AC11-P5_04/1947, |
| | complete genome |
| 516 | >MH061910.1 Zika virus strain ZIKV/Macaca mulatta/UGA/MR-766-VEROE6-FA12-P7_04/1947, |
| | complete genome |
| 517 | >MH061911.1 Zika virus strain ZIKV/Macaca mulatta/UGA/MR-766-VEROE6-GD12- |
| | P10_06/1947, complete genome |
| 518 | >MH061912.1 Zika virus strain ZIKV/Macaca mulatta/UGA/MR-766-VEROE6-GA3-P10_03/1947, |
| | complete genome |
| 519 | >MH061913.1 Zika virus strain ZIKV/Macaca mulatta/UGA/MR-766-VEROE6-GA3-P10_05/1947, |
| | complete genome |
| 520 | >MH061914.1 Zika virus strain ZIKV/Macaca mulatta/UGA/MR-766-VEROE6-GA3-P10_02/1947, |
| | complete genome |
| 521 | >MH061915.1 Zika virus strain ZIKV/Macaca mulatta/UGA/MR-766-VEROE6-P12_02/1947, |
| | complete genome |
| 522 | >LC369584.1 Zika virus ZIKV/Hu/Thai/KngSG/17-D501 genomic RNA, nearly complete genome |
| 523 | >MG827392.1 Zika virus strain PF13/251013-18, complete genome |
| 524 | >MG674718.1 Zika virus isolate ZKC2P4, complete genome |
| 525 | >MG674719.1 Zika virus isolate ZKC2P6, complete genome |
| 526 | >KY766069.1 Zika virus isolate Pf13/251013-18, complete genome |
| 527 | >MF794971.1 Zika virus strain ZIKV/EC/Esmeraldas/121/2016, complete genome |
| 528 | >KY553111.1 Zika virus isolate AFMC-U, complete genome |
| 529 | >MF384325.1 Zika virus isolate mosquito/Haiti/1682/2016, complete genome |
| 530 | >MF352141.1 Zika virus isolate PE243, complete genome |
| 531 | >KY415986.1 Zika virus isolate Haiti/0029/2014, complete genome |
| 532 | >KY415987.1 Zika virus isolate Haiti/0033/2014, complete genome |
| 533 | >KY415988.1 Zika virus isolate Haiti/0054/2014, complete genome |
| 534 | >KY415989.1 Zika virus isolate Haiti/0074/2014, complete genome |
| 535 | >KY415990.1 Zika virus isolate Haiti/0036/2014, complete genome |
| 536 | >KY415991.1 Zika virus isolate Haiti/0097/2014, complete genome |
| 537 | >KY989511.1 Zika virus strain MR 766, complete genome |
| 538 | >KY989971.1 Zika virus isolate FLA, complete genome |
| 539 | >KX051560.1 Zika virus isolate SK364/13AS, complete genome |
| 540 | >KX051561.1 Zika virus isolate SK403/13AS, complete genome |
| 541 | >KX051562.1 Zika virus isolate SV0010/15, complete genome |
| 542 | >KY765317.1 Zika virus strain ZIKV/Homo sapiens/NIC/7252_12A1/2016, complete genome |
| 543 | >KY765318.1 Zika virus strain ZIKV/Homo sapiens/NIC/4886_12A1/2016, complete genome |
| 544 | >KY765320.1 Zika virus strain ZIKV/Homo sapiens/NIC/6406_13A1_SP/2016, complete genome |
| 545 | >KY765321.1 Zika virus strain ZIKV/Homo sapiens/NIC/4886_12A1_SP/2016, complete genome |
| 546 | >KY765322.1 Zika virus strain ZIKV/Homo sapiens/NIC/7252_12A1_SP/2016, complete genome |
| 547 | >KY765323.1 Zika virus strain ZIKV/Homo sapiens/NIC/6188_13A1/2016, complete genome |
| 548 | >KY765324.1 Zika virus strain ZIKV/Homo sapiens/NIC/8610_13A1/2016, complete genome |
| 549 | >KY765325.1 Zika virus strain ZIKV/Homo sapiens/NIC/5005_13A1/2016, complete genome |
| 550 | >KY765326.1 Zika virus strain ZIKV/Homo sapiens/NIC/6188_13A1_SP/2016, complete genome |
| 551 | >KY765327.1 Zika virus strain ZIKV/Homo sapiens/NIC/5005_13A1_SP/2016, complete genome |
| 552 | >KY631493.1 Zika virus isolate MEX_ENCB165, complete genome |
| 553 | >KY631494.1 Zika virus isolate MEX_ENCB165P4, complete genome |
| 554 | >LC219720.1 Zika virus genomic RNA, complete genome, strain: ZIKV/Hu/NIID123/2016 |
| 555 | >KY648934.1 Zika virus strain ZIKV/Aedes aegypti/MEX/MEX_I-44/2016, complete genome |
| 556 | >KX827268.1 Zika virus strain ZIKV/Homo sapiens/USA/UT-1/2016, complete genome |
| 557 | >KY348640.1 Zika virus strain SL1602, complete genome |
| 558 | >KU761560.1 Zika virus isolate ZJ03, complete genome |
| 559 | >KU761561.1 Zika virus isolate ZJ02, complete genome |
| 560 | >KY272991.1 Zika virus isolate RIO-BM1, complete genome |
| 561 | >KY288905.1 Zika virus strain MP1751, complete genome |
| 562 | >KY328289.1 Zika virus isolate HN16, complete genome |
| 563 | >KY272987.1 Zika virus isolate SI-BKK01, complete genome |
| 564 | >KY120348.1 Zika virus strain MEX_CIENI551P4, complete genome |
| 565 | >KY120349.2 Zika virus strain MEX_CIENI551, complete genome |
| 566 | >KX269878.1 Zika virus isolate Haiti/2016/PD, complete genome |
| 567 | >LC191864.1 Zika virus genomic RNA, complete genome, strain: ZIKV/Hu/Chiba/S36/2016 |
| 568 | >LC190723.1 Zika virus genomic RNA, complete genome, strain: ZIKV/Hu/Yokohama/1/2016 |
| 569 | >KX893855.1 Zika virus strain Zika virus/Homo sapiens/VEN/UF-2/2016, complete genome |
| 570 | >KX879603.1 Zika virus strain ZIKV/EC/Esmeraldas/062/2016, complete genome |
| 571 | >KX879604.1 Zika virus strain ZIKV/EC/Esmeraldas/089/2016, complete genome |
| 572 | >KX830960.1 Zika virus culture ATCC: VR-84 isolate MR776, complete genome |
| 573 | >KX811222.1 Zika virus isolate Brazil_2015_MG, complete genome |
| 574 | >KX856011.1 Zika virus strain ZIKV/Aedes sp./MEX_I-44/2016, complete genome |
| 575 | >KX197205.1 Zika virus isolate 9, complete genome |
| 576 | >KX806557.3 Zika virus isolate TS17-2016, complete genome |
| 577 | >KX766028.1 Zika virus isolate R114916, complete genome |
| 578 | >KX766029.1 Zika virus isolate R116265, complete genome |
| 579 | >KX702400.1 Zika virus strain Zika virus/Homo sapiens/VEN/UF-1/2016, complete genome |
| 580 | >KX694532.2 Zika virus strain ZIKV/Homo sapiens/THA/PLCal_ZV/2013, complete genome |
| 581 | >KX694533.2 Zika virus strain ZIKV/Aedes aegypti/MYS/P6-740/1966, complete genome |
| 582 | >KX694534.2 Zika virus strain ZIKV/Homo sapiens/HND/R103451/2015, complete genome |
| 583 | >KX673530.1 Zika virus isolate PHE_semen_Guadeloupe, complete genome |
| 584 | >KX266255.1 Zika virus isolate ZIKV_SMGC-1, complete genome |
| 585 | >KX601166.2 Zika virus strain ZIKV/Aedes africanus/SEN/DakAr41524/1984, complete genome |
| 586 | >KX601167.1 Zika virus strain ZIKV/Aedes sp./MYS/P6-740/1966, complete genome |
| 587 | >KX601168.1 Zika virus strain ZIKV/Homo Sapiens/PRI/PRVABC59/2015, complete genome |
| 588 | >KX601169.1 Zika virus strain ZIKV/Macaca mulatta/UGA/MR-766/1947, complete genome |
| 589 | >KX369547.1 Zika virus strain PF13/251013-18, complete genome |
| 590 | >KX446950.2 Zika virus strain ZIKV/Aedes. sp/MEX/MEX_2-81/2016, complete genome |
| 591 | >KX446951.2 Zika virus strain ZIKV/Aedes. sp/MEX/MEX_I-7/2016, complete genome |
| 592 | >KX377335.1 Zika virus strain MR-766, complete genome |
| 593 | >KX377336.1 Zika virus strain P6-740, complete genome |
| 594 | >KX377337.1 Zika virus strain PRVABC-59, complete genome |
| 595 | >KX280026.1 Zika virus isolate Paraiba_01, complete genome |
| 596 | >KX262887.1 Zika virus isolate 103451, complete genome |
| 597 | >KX253996.1 Zika virus isolate ZKC2/2016, complete genome |
| 598 | >KX247646.1 Zika virus isolate Zika virus/Homo sapiens/COL/UF-1/2016, complete genome |
| 599 | >KX197192.1 Zika virus isolate ZIKV/H. sapiens/Brazil/PE243/2015, complete genome |
| 600 | >KX198134.2 Zika virus strain ZIKV/Aedes africanus/SEN/DAK-AR-41524_A1C1-V2/1984, |
| | complete genome |
| 601 | >KX198135.2 Zika virus strain ZIKV/Homo sapiens/PAN/BEI-259634_V4/2016, complete genome |
| 602 | >KX156774.2 Zika virus strain ZIKV/Homo sapiens/PAN/CDC-259359_V1-V3/2015, complete |
| | genome |
| 603 | >KX156775.2 Zika virus strain ZIKV/Homo sapiens/PAN/CDC-259249_V1-V3/2015, complete |
| | genome |
| 604 | >KX156776.2 Zika virus strain ZIKV/Homo sapiens/PAN/CDC-259364_V1-V2/2015, complete |
| | genome |
| 605 | >KX117076.1 Zika virus isolate Zhejiang04, complete genome |
| 606 | >KX087101.3 Zika virus strain ZIKV/Homo sapiens/PRI/PRVABC59/2015, complete genome |
| 607 | >KX087102.2 Zika virus strain ZIKV/Homo sapiens/COL/FLR/2015, complete genome |
| 608 | >KX051563.1 Zika virus isolate Haiti/1/2016, complete genome |
| 609 | >KU955591.1 Zika virus isolate Zika virus/A. africanus-tc/SEN/1984/41525-DAK, complete genome |
| 610 | >KU955592.1 Zika virus isolate Zika virus/A. taylori-tc/SEN/1984/41662-DAK, complete genome |
| 611 | >KU955593.1 Zika virus isolate Zika virus/H. sapiens-tc/KHM/2010/FSS13025, complete genome |
| 612 | >KU955594.1 Zika virus isolate Zika virus/M. mulatta-tc/UGA/1947/MR-766, complete genome |
| 613 | >KU955595.1 Zika virus isolate Zika virus/A. taylori-tc/SEN/1984/41671-DAK, complete genome |
| 614 | >KU870645.1 Zika virus isolate FB-GWUH-2016, complete genome |
| 615 | >KU926309.2 Zika virus isolate Rio-U1, complete genome |
| 616 | >KU926310.2 Zika virus isolate Rio-S1, complete genome |
| 617 | >KU922923.1 Zika virus isolate MEX/InDRE/Lm/2016, complete genome |
| 618 | >KU922960.1 Zika virus isolate MEX/InDRE/Sm/2016, complete genome |
| 619 | >KU853012.1 Zika virus isolate Dominican Republic/2016/PD1, complete genome |
| 620 | >KU853013.1 Zika virus isolate Dominican Republic/2016/PD2, complete genome |
| 621 | >KU820899.2 Zika virus isolate ZJ03, complete genome |
| 622 | >KU744693.1 Zika virus isolate VE_Ganxian, complete genome |
| 623 | >KU497555.1 Zika virus isolate Brazil-ZKV2015, complete genome |
| 624 | >KU707826.1 Zika virus isolate SSABR1, complete genome |
| 625 | >KU527068.1 Zika virus strain Natal RGN, complete genome |
| 626 | >KU681081.3 Zika virus isolate Zika virus/H. sapiens-tc/THA/2014/SV0127- 14, complete genome |
| 627 | >KU681082.3 Zika virus isolate Zika virus/H. sapiens-tc/PHL/2012/CPC-0740, complete genome |
| 628 | >KU509998.3 Zika virus strain Haiti/1225/2014, complete genome |
| 629 | >KU501215.1 Zika virus strain PRVABC59, complete genome |
| 630 | >KU321639.1 Zika virus strain ZikaSPH2015, complete genome |
| 631 | >LC002520.1 Zika virus genomic RNA, complete genome, strain: MR766-NIID |
| 632 | >KJ776791.2 Zika virus strain H/PF/2013, complete genome |
| 633 | >AY632535.2 Zika virus strain MR 766, complete genome |

TABLE 1D
Non-limiting example Zika Capsid (C) sequences

| SEQ | Zika viruses with example Capsid | SEQ | Zika viruses having with example Capsid |
|---|---|---|---|
| ID NO | proteins | ID NO | proteins |
| 634 | >YP_009430295.1 anchored capsid protein C | 891 | >AWF93634.1 Flavivirus capsid protein C |
| 635 | >YP_009430295.1 Flavivirus capsid protein C | 892 | >AWF93635.1 capsid protein C |
| 636 | >YP_009430296.1 capsid protein C | 893 | >AWF93635.1 Flavivirus capsid protein C |
| 637 | >YP_009430296.1 Flavivirus capsid protein C | 894 | >AVZ47169.1 Flavivirus capsid protein C |
| 638 | >YP_009428568.1 anchored capsid protein C | 895 | >AVW85800.1 capsid protein C |
| 639 | >YP_009428568.1 capsid protein C | 896 | >AVW85800.1 Flavivirus capsid protein C |
| 640 | >YP_009428568.1 Flavivirus capsid protein C | 897 | >AVW85801.1 capsid protein C |
| 641 | >YP_009227196.1 capsid protein C | 898 | >AVW85801.1 Flavivirus capsid protein C |
| 642 | >YP_009227196.1 Flavivirus capsid protein C | 899 | >AVW85802.1 capsid protein C |
| 643 | >YP_009227206.1 anchored capsid protein C | 900 | >AVW85802.1 Flavivirus capsid protein C |
| 644 | >YP_009227206.1 Flavivirus capsid protein C | 901 | >AVW85803.1 capsid protein C |
| 645 | >YP_002790881.1 capsid protein C | 902 | >AVW85803.1 Flavivirus capsid protein C |
| 646 | >YP_002790881.1 Flavivirus capsid protein C | 903 | >AVW85804.1 capsid protein C |
| 647 | >UHI99865.1 anchored capsid protein C | 904 | >AVW85804.1 Flavivirus capsid protein C |
| 648 | >UHI99865.1 capsid protein C | 905 | >AVW85805.1 capsid protein C |
| 649 | >UHI99865.1 Flavivirus capsid protein C | 906 | >AVW85805.1 Flavivirus capsid protein C |
| 650 | >UHI99866.1 anchored capsid protein C | 907 | >AVW85806.1 capsid protein C |
| 651 | >UHI99866.1 capsid protein C | 908 | >AVW85806.1 Flavivirus capsid protein C |
| 652 | >UHI99866.1 Flavivirus capsid protein C | 909 | >AVW85807.1 capsid protein C |
| 653 | >UHI99867.1 anchored capsid protein C | 910 | >AVW85807.1 Flavivirus capsid protein C |
| 654 | >UHI99867.1 capsid protein C | 911 | >AVW85808.1 capsid protein C |
| 655 | >UED15620.1 anchored capsid protein C | 912 | >AVW85808.1 Flavivirus capsid protein C |
| 656 | >UED15620.1 capsid protein C | 913 | >AVW85809.1 capsid protein C |
| 657 | >UED15620.1 Flavivirus capsid protein C | 914 | >AVW85809.1 Flavivirus capsid protein C |
| 658 | >UBI73854.1 anchored capsid protein C | 915 | >AVW85810.1 capsid protein C |
| 659 | >UBI73854.1 capsid protein C | 916 | >AVW85810.1 Flavivirus capsid protein C |
| 660 | >UBI73854.1 Flavivirus capsid protein C | 917 | >AVW85811.1 capsid protein C |
| 661 | >QKF93428.1 anchored capsid protein C | 918 | >AVW85811.1 Flavivirus capsid protein C |
| 662 | >QKF93428.1 capsid protein C | 919 | >AVW85812.1 capsid protein C |
| 663 | >QKF93428.1 Flavivirus capsid protein C | 920 | >AVW85812.1 Flavivirus capsid protein C |
| 664 | >QKF93429.1 anchored capsid protein C | 921 | >AVW85813.1 capsid protein C |
| 665 | >QKF93429.1 capsid protein C | 922 | >AVW85813.1 Flavivirus capsid protein C |
| 666 | >QKF93429.1 Flavivirus capsid protein C | 923 | >AVW85814.1 capsid protein C |
| 667 | >QKF93430.1 anchored capsid protein C | 924 | >AVW85814.1 Flavivirus capsid protein C |
| 668 | >QKF93430.1 capsid protein C | 925 | >AVW85815.1 capsid protein C |
| 669 | >QKF93430.1 Flavivirus capsid protein C | 926 | >AVW85815.1 Flavivirus capsid protein C |
| 670 | >QKF93431.1 anchored capsid protein C | 927 | >AVW85816.1 capsid protein C |
| 671 | >QKF93431.1 capsid protein C | 928 | >AVW85816.1 Flavivirus capsid protein C |
| 672 | >QKF93431.1 Flavivirus capsid protein C | 929 | >AVW85817.1 capsid protein C |
| 673 | >QKF93432.1 anchored capsid protein C | 930 | >AVW85817.1 Flavivirus capsid protein C |
| 674 | >QKF93432.1 capsid protein C | 931 | >AVW85818.1 capsid protein C |
| 675 | >QKF93432.1 Flavivirus capsid protein C | 932 | >AVW85818.1 Flavivirus capsid protein C |
| 676 | >QKF93433.1 anchored capsid protein C | 933 | >AVW85819.1 capsid protein C |
| 677 | >QKF93433.1 capsid protein C | 934 | >AVW85819.1 Flavivirus capsid protein C |
| 678 | >QKF93433.1 Flavivirus capsid protein C | 935 | >AVW85820.1 capsid protein C |
| 679 | >QKF93434.1 anchored capsid protein C | 936 | >AVW85820.1 Flavivirus capsid protein C |
| 680 | >QKF93434.1 capsid protein C | 937 | >AVW85821.1 capsid protein C |
| 681 | >QKF93434.1 Flavivirus capsid protein C | 938 | >AVW85821.1 Flavivirus capsid protein C |
| 682 | >QKF93435.1 anchored capsid protein C | 939 | >AVW85822.1 capsid protein C |
| 683 | >QKF93435.1 capsid protein C | 940 | >AVW85822.1 Flavivirus capsid protein C |
| 684 | >QKF93435.1 Flavivirus capsid protein C | 941 | >AVW85823.1 capsid protein C |
| 685 | >QKF93436.1 anchored capsid protein C | 942 | >AVW85823.1 Flavivirus capsid protein C |
| 686 | >QKF93436.1 capsid protein C | 943 | >AVW85824.1 capsid protein C |
| 687 | >QKF93436.1 Flavivirus capsid protein C | 944 | >AVW85824.1 Flavivirus capsid protein C |
| 688 | >QKF93437.1 anchored capsid protein C | 945 | >AVW85825.1 capsid protein C |
| 689 | >QKF93437.1 capsid protein C | 946 | >AVW85825.1 Flavivirus capsid protein C |
| 690 | >QKF93437.1 Flavivirus capsid protein C | 947 | >AVW85826.1 capsid protein C |
| 691 | >QKF93438.1 anchored capsid protein C | 948 | >AVW85826.1 Flavivirus capsid protein C |
| 692 | >QKF93438.1 capsid protein C | 949 | >AVW85827.1 capsid protein C |
| 693 | >QKF93438.1 Flavivirus capsid protein C | 950 | >AVW85827.1 Flavivirus capsid protein C |
| 694 | >QKF93439.1 anchored capsid protein C | 951 | >AVW85828.1 capsid protein C |
| 695 | >QKF93439.1 capsid protein C | 952 | >AVW85828.1 Flavivirus capsid protein C |
| 696 | >QKF93439.1 Flavivirus capsid protein C | 953 | >AVW85829.1 capsid protein C |
| 697 | >QKF93440.1 anchored capsid protein C | 954 | >AVW85829.1 Flavivirus capsid protein C |
| 698 | >QKF93440.1 capsid protein C | 955 | >AVW85830.1 capsid protein C |
| 699 | >QKF93440.1 Flavivirus capsid protein C | 956 | >AVW85830.1 Flavivirus capsid protein C |
| 700 | >QKF93441.1 anchored capsid protein C | 957 | >AVW85831.1 capsid protein C |
| 701 | >QKF93441.1 capsid protein C | 958 | >AVW85831.1 Flavivirus capsid protein C |
| 702 | >QKF93441.1 Flavivirus capsid protein C | 959 | >AVW85832.1 capsid protein C |
| 703 | >QVL61761.1 Flavivirus capsid protein C | 960 | >AVW85832.1 Flavivirus capsid protein C |
| 704 | >QPC45464.1 Flavivirus capsid protein C | 961 | >AVW85833.1 capsid protein C |
| 705 | >QTA38993.1 anchored capsid protein C | 962 | >AVW85833.1 Flavivirus capsid protein C |
| 706 | >QTA38993.1 Flavivirus capsid protein C | 963 | >AVW85834.1 capsid protein C |
| 707 | >QTA38994.1 anchored capsid protein C | 964 | >AVW85834.1 Flavivirus capsid protein C |
| 708 | >QTA38994.1 Flavivirus capsid protein C | 965 | >AVW85835.1 capsid protein C |
| 709 | >QOF88708.1 anchored capsid protein C | 966 | >AVW85835.1 Flavivirus capsid protein C |
| 710 | >QOF88708.1 capsid protein C | 967 | >AVW85836.1 capsid protein C |
| 711 | >QOF88708.1 Flavivirus capsid protein C | 968 | >AVW85836.1 Flavivirus capsid protein C |
| 712 | >QLI34051.1 Flavivirus capsid protein C | 969 | >AVW85837.1 capsid protein C |
| 713 | >QKX95861.1 capsid protein C | 970 | >AVW85837.1 Flavivirus capsid protein C |
| 714 | >QKX95861.1 Flavivirus capsid protein C | 971 | >AVW85838.1 capsid protein C |
| 715 | >QKU35968.1 anchored capsid protein C | 972 | >AVW85838.1 Flavivirus capsid protein C |
| 716 | >QKU35968.1 capsid protein C | 973 | >AVW85839.1 capsid protein C |
| 717 | >QKU35968.1 Flavivirus capsid protein C | 974 | >AVW85839.1 Flavivirus capsid protein C |
| 718 | >QKM77298.1 anchored capsid protein C | 975 | >AVW85840.1 capsid protein C |
| 719 | >QKM77298.1 capsid protein C | 976 | >AVW85840.1 Flavivirus capsid protein C |
| 720 | >OKM77298. 1 Flavivirus capsid protein C | 977 | >AVW85841.1 capsid protein C |
| 721 | >QKM77299.1 anchored capsid protein C | 978 | >AVW85841.1 Flavivirus capsid protein C |
| 722 | >QKM77299.1 capsid protein C | 979 | >AVW85842.1 capsid protein C |
| 723 | >QKM77299.1 Flavivirus capsid protein C | 980 | >AVW85842.1 Flavivirus capsid protein C |
| 724 | >QKM77300.1 anchored capsid protein C | 981 | >AVW85843.1 capsid protein C |
| 725 | >QKM77300.1 capsid protein C | 982 | >AVW85843.1 Flavivirus capsid protein C |
| 726 | >QKM77300.1 Flavivirus capsid protein C | 983 | >AVW85844.1 capsid protein C |
| 727 | >QKM77301.1 anchored capsid protein C | 984 | >AVW85844.1 Flavivirus capsid protein C |
| 728 | >QKM77301.1 capsid protein C | 985 | >AVW85845.1 capsid protein C |
| 729 | >QKM77301.1 Flavivirus capsid protein C | 986 | >AVW85845.1 Flavivirus capsid protein C |
| 730 | >QBM11757.1 capsid | 987 | >AVW85846.1 capsid protein C |
| 731 | >QBM11757.1 Flavivirus capsid protein C | 988 | >AVW85846.1 Flavivirus capsid protein C |
| 732 | >AZS35403.1 Flavivirus capsid protein C | 989 | >AVW85847.1 capsid protein C |
| 733 | >AZS35404.1 Flavivirus capsid protein C | 990 | >AVW85847.1 Flavivirus capsid protein C |
| 734 | >AZS35405.1 Flavivirus capsid protein C | 991 | >AVW85848.1 capsid protein C |
| 735 | >QGA72951.1 anchored capsid protein C | 992 | >AVW85848.1 Flavivirus capsid protein C |
| 736 | >QGA72951.1 capsid protein C | 993 | >AVW85849.1 capsid protein C |
| 737 | >QGA72951.1 Flavivirus capsid protein C | 994 | >AVW85849.1 Flavivirus capsid protein C |
| 738 | >QGA67050.1 anchored capsid protein C | 995 | >AVW85850.1 capsid protein C |
| 739 | >QGA67050.1 capsid protein C | 996 | >AVW85850.1 Flavivirus capsid protein C |
| 740 | >QGA67050.1 Flavivirus capsid protein C | 997 | >AVW85851.1 capsid protein C |
| 741 | >QGA67051.1 anchored capsid protein C | 998 | >AVW85851.1 Flavivirus capsid protein C |
| 742 | >QGA67051.1 capsid protein C | 999 | >AVW85852.1 capsid protein C |
| 743 | >QGA67051.1 Flavivirus capsid protein C | 1000 | >AVW85852.1 Flavivirus capsid protein C |
| 744 | >QGA67052.1 anchored capsid protein C | 1001 | >AVW85853.1 capsid protein C |
| 745 | >QGA67052.1 capsid protein C | 1002 | >AVW85853.1 Flavivirus capsid protein C |
| 746 | >QGA67052.1 Flavivirus capsid protein C | 1003 | >AVW85854.1 capsid protein C |
| 747 | >QGA67053.1 anchored capsid protein C | 1004 | >AVW85854.1 Flavivirus capsid protein C |
| 748 | >QGA67053.1 capsid protein C | 1005 | >AVW85855.1 capsid protein C |
| 749 | >QGA67053.1 Flavivirus capsid protein C | 1006 | >AVW85855.1 Flavivirus capsid protein C |
| 750 | >QGA67054.1 anchored capsid protein C | 1007 | >AVW85856.1 capsid protein C |
| 751 | >QGA67054.1 capsid protein C | 1008 | >AVW85856.1 Flavivirus capsid protein C |
| 752 | >QGA67054.1 Flavivirus capsid protein C | 1009 | >AVW85857.1 capsid protein C |
| 753 | >QGA67055.1 anchored capsid protein C | 1010 | >AVW85857.1 Flavivirus capsid protein C |
| 754 | >QGA67055.1 capsid protein C | 1011 | >AVW85858.1 capsid protein C |
| 755 | >QGA67055.1 Flavivirus capsid protein C | 1012 | >AVW85858.1 Flavivirus capsid protein C |
| 756 | >QGA67056.1 anchored capsid protein C | 1013 | >AVW85859.1 capsid protein C |
| 757 | >QGA67056.1 capsid protein C | 1014 | >AVW85859.1 Flavivirus capsid protein C |
| 758 | >QGA67056.1 Flavivirus capsid protein C | 1015 | >AVW85860.1 capsid protein C |
| 759 | >QFZ95661.1 anchored capsid protein C | 1016 | >AVW85860.1 Flavivirus capsid protein C |
| 760 | >QFZ95661.1 capsid protein C | 1017 | >AVW85861.1 capsid protein C |
| 761 | >QFZ95661.1 Flavivirus capsid protein C | 1018 | >AVW85861.1 Flavivirus capsid protein C |
| 762 | >QDZ58854.1 Flavivirus capsid protein C | 1019 | >AVW85862.1 capsid protein C |
| 763 | >QDZ58855.1 Flavivirus capsid protein C | 1020 | >AVW85862.1 Flavivirus capsid protein C |
| 764 | >QDZ58856.1 Flavivirus capsid protein C | 1021 | >AVW85863.1 capsid protein C |
| 765 | >AXQ39996.1 anchored capsid protein C | 1022 | >AVW85863.1 Flavivirus capsid protein C |
| 766 | >AXQ39996.1 capsid protein C | 1023 | >BBC70847.1 Flavivirus capsid protein C |
| 767 | >AXQ39996.1 Flavivirus capsid protein C | 1024 | >AVG19275.1 Flavivirus capsid protein C |
| 768 | >AXQ39997.1 anchored capsid protein C | 1025 | >AUI42329.1 Flavivirus capsid protein C |
| 769 | >AXQ39997.1 capsid protein C | 1026 | >AUI42330.1 Flavivirus capsid protein C |
| 770 | >AXQ39997.1 Flavivirus capsid protein C | 1027 | >ARB08102.1 Flavivirus capsid protein C |
| 771 | >AXQ39998.1 anchored capsid protein C | 1028 | >ATB53752.1 Flavivirus capsid protein C |
| 772 | >AXQ39998.1 capsid protein C | 1029 | >AQS26698.1 Flavivirus capsid protein C |
| 773 | >AXQ39998.1 Flavivirus capsid protein C | 1030 | >ASF57880.1 Flavivirus capsid protein C |
| 774 | >AXQ39999.1 anchored capsid protein C | 1031 | >ASB32509.1 capsid protein C |
| 775 | >AXQ39999.1 capsid protein C | 1032 | >ASB32509.1 Flavivirus capsid protein C |
| 776 | >AXQ39999.1 Flavivirus capsid protein C | 1033 | >APW84872.1 Flavivirus capsid protein C |
| 777 | >AXQ40000.1 anchored capsid protein C | 1034 | >APW84873.1 Flavivirus capsid protein C |
| 778 | >AXQ40000.1 capsid protein C | 1035 | >APW84874.1 Flavivirus capsid protein C |
| 779 | >AXQ40000.1 Flavivirus capsid protein C | 1036 | >APW84875.1 Flavivirus capsid protein C |
| 780 | >AXQ40001.1 anchored capsid protein C | 1037 | >APW84876.1 Flavivirus capsid protein C |
| 781 | >AXQ40001.1 capsid protein C | 1038 | >APW84877.1 Flavivirus capsid protein C |
| 782 | >AXQ40001.1 Flavivirus capsid protein C | 1039 | >ARM59239.1 Flavivirus capsid protein C |
| 783 | >AXQ40002.1 anchored capsid protein C | 1040 | >ARM59240.1 capsid protein C |
| 784 | >AXQ40002.1 capsid protein C | 1041 | >ARM59240.1 Flavivirus capsid protein C |
| 785 | >AXQ40002.1 Flavivirus capsid protein C | 1042 | >AMX81915.1 Flavivirus capsid protein C |
| 786 | >AXQ40003.1 anchored capsid protein C | 1043 | >AMX81916.1 Flavivirus capsid protein C |
| 787 | >AXQ40003.1 capsid protein C | 1044 | >AMX81917.1 Flavivirus capsid protein C |
| 788 | >AXQ40003.1 Flavivirus capsid protein C | 1045 | >AQZ41947.1 capsid protein C |
| 789 | >AXQ40004.1 anchored capsid protein C | 1046 | >AQZ41947.1 Flavivirus capsid protein C |
| 790 | >AXQ40004.1 capsid protein C | 1047 | >AQZ41948.1 capsid protein C |
| 791 | >AXQ40004.1 Flavivirus capsid protein C | 1048 | >AQZ41948.1 Flavivirus capsid protein C |
| 792 | >AXQ40005.1 anchored capsid protein C | 1049 | >AQZ41949.1 capsid protein C |
| 793 | >AXQ40005.1 capsid protein C | 1050 | >AQZ41949.1 Flavivirus capsid protein C |
| 794 | >AXQ40005.1 Flavivirus capsid protein C | 1051 | >AQZ41950.1 capsid protein C |
| 795 | >AXQ40006.1 anchored capsid protein C | 1052 | >AQZ41950.1 Flavivirus capsid protein C |
| 796 | >AXQ40006.1 capsid protein C | 1053 | >AQZ41951.1 capsid protein C |
| 797 | >AXQ40006.1 Flavivirus capsid protein C | 1054 | >AQZ41951.1 Flavivirus capsid protein C |
| 798 | >AXQ40007.1 anchored capsid protein C | 1055 | >AQZ41952.1 capsid protein C |
| 799 | >AXQ40007.1 capsid protein C | 1056 | >AQZ41952.1 Flavivirus capsid protein C |
| 800 | >AXQ40007.1 Flavivirus capsid protein C | 1057 | >AQZ41953.1 capsid protein C |
| 801 | >QDH45910.1 Flavivirus capsid protein C | 1058 | >AQZ41953.1 Flavivirus capsid protein C |
| 802 | >QCG74166.1 Flavivirus capsid protein C | 1059 | >AQZ41954.1 capsid protein C |
| 803 | >AYV74916.1 Flavivirus capsid protein C | 1060 | >AQZ41954.1 Flavivirus capsid protein C |
| 804 | >AYV74917.1 Flavivirus capsid protein C | 1061 | >AQZ41955.1 capsid protein C |
| 805 | >AYV74918.1 Flavivirus capsid protein C | 1062 | >AQZ41955.1 Flavivirus capsid protein C |
| 806 | >AYV74919.1 Flavivirus capsid protein C | 1063 | >AQZ41956.1 capsid protein C |
| 807 | >AYV74920.1 Flavivirus capsid protein C | 1064 | >AQZ41956.1 Flavivirus capsid protein C |
| 808 | >AYV74921.1 Flavivirus capsid protein C | 1065 | >AQW43707.1 Flavivirus capsid protein C |
| 809 | >AYV74922.1 Flavivirus capsid protein C | 1066 | >AQW43708.1 Flavivirus capsid protein C |
| 810 | >AYV74923.1 Flavivirus capsid protein C | 1067 | >BAX00477.1 Flavivirus capsid protein C |
| 811 | >AYV74924.1 Flavivirus capsid protein C | 1068 | >AQV07165.1 capsid protein C |
| 812 | >AYV74925.1 Flavivirus capsid protein C | 1069 | >AQV07165.1 Flavivirus capsid protein C |
| 813 | >AYV74927.1 Flavivirus capsid protein C | 1070 | >AOO19564.1 Flavivirus capsid protein C |
| 814 | >AYV74928.1 Flavivirus capsid protein C | 1071 | >APO36913.1 Flavivirus capsid protein C |
| 815 | >AYV74929.1 Flavivirus capsid protein C | 1072 | >AMM43325.1 Flavivirus capsid protein C |
| 816 | >AYV74930.1 Flavivirus capsid protein C | 1073 | >AMM43326.1 Flavivirus capsid protein C |
| 817 | >AYV74931.1 Flavivirus capsid protein C | 1074 | >APH11492.1 anchored capsid protein C |
| 818 | >AYV74932.1 Flavivirus capsid protein C | 1075 | >APH11492.1 capsid protein C |
| 819 | >AYV74933.1 Flavivirus capsid protein C | 1076 | >APH11492.1 Flavivirus capsid protein C |
| 820 | >AYV74934.1 Flavivirus capsid protein C | 1077 | >APO08503.1 Flavivirus capsid protein C |
| 821 | >AYV74935.1 Flavivirus capsid protein C | 1078 | >APC60216.2 Flavivirus capsid protein C |
| 822 | >AYV74936.1 Flavivirus capsid protein C | 1079 | >ANH22038.1 Flavivirus capsid protein C |
| 823 | >AYV74937.1 Flavivirus capsid protein C | 1080 | >BAV82373.1 Flavivirus capsid protein C |
| 824 | >AYU74865.1 Flavivirus capsid protein C | 1081 | >AOR82892.1 Flavivirus capsid protein C |
| 825 | >ATB53753.1 Flavivirus capsid protein C | 1082 | >AOR82893.1 Flavivirus capsid protein C |
| 826 | >ATB53754.1 Flavivirus capsid protein C | 1083 | >AOR51315.1 Flavivirus capsid protein C |
| 827 | >AVC63697.1 Flavivirus capsid protein C | 1084 | >AND01116.2 Flavivirus capsid protein C |
| 828 | >AVC63698.1 Flavivirus capsid protein C | 1085 | >AOG18296.1 Flavivirus capsid protein C |
| 829 | >AYI50273.1 capsid protein C | 1086 | >AOC50652.1 capsid protein C |
| 830 | >AYI50273.1 Flavivirus capsid protein C | 1087 | >AOC50653.1 capsid protein C |
| 831 | >AYI50274.1 capsid protein C | 1088 | >AOC50654.1 capsid protein C |
| 832 | >AYI50274.1 Flavivirus capsid protein C | 1089 | >ANZ46736.1 Flavivirus capsid protein C |
| 833 | >AYI50275.1 capsid protein C | 1090 | >ANW07474.2 capsid protein C |
| 834 | >AYI50275.1 Flavivirus capsid protein C | 1091 | >ANW07474.2 Flavivirus capsid protein C |
| 835 | >ASR91936.1 Flavivirus capsid protein C | 1092 | >ANW07475.1 capsid protein C |
| 836 | >AXF50014.1 capsid | 1093 | >ANW07476.1 capsid protein C |
| 837 | >AXF50014.1 Flavivirus capsid protein C | 1094 | >ANW07476.1 Flavivirus capsid protein C |
| 838 | >AXF50015.1 capsid | 1095 | >ANW07477.1 capsid protein C |
| 839 | >AXF50015.1 Flavivirus capsid protein C | 1096 | >ANW07477.1 Flavivirus capsid protein C |
| 840 | >AXF50016.1 capsid | 1097 | >ANN44857.1 Flavivirus capsid protein C |
| 841 | >AXF50016.1 Flavivirus capsid protein C | 1098 | >ANN83272.1 capsid protein C |
| 842 | >AXF50052.1 Flavivirus capsid protein C | 1099 | >ANN83273.1 capsid protein C |
| 843 | >ATL14618.1 Flavivirus capsid protein C | 1100 | >ANK57897.1 Flavivirus capsid protein C |
| 844 | >AUF35021.1 Flavivirus capsid protein C | 1101 | >ANH10698.1 Flavivirus capsid protein C |
| 845 | >AUF35022.1 Flavivirus capsid protein C | 1102 | >ANG09399.1 Flavivirus capsid protein C |
| 846 | >AVG19202.1 Flavivirus capsid protein C | 1103 | >ANF16414.1 Flavivirus capsid protein C |
| 847 | >AVG19203.1 Flavivirus capsid protein C | 1104 | >ANC90426.1 capsid |
| 848 | >AVV62004.1 Flavivirus capsid protein C | 1105 | >ANC90427.1 capsid protein C |
| 849 | >ARU07074.1 Flavivirus capsid protein C | 1106 | >ANC90428.1 capsid protein C |
| 850 | >ARU07075.1 Flavivirus capsid protein C | 1107 | >ANC90428.1 Flavivirus capsid protein C |
| 851 | >ARU07076.1 Flavivirus capsid protein C | 1108 | >ANB66182.1 capsid protein C |
| 852 | >AUY62552.1 Flavivirus capsid protein C | 1109 | >ANB66182.1 Flavivirus capsid protein C |
| 853 | >AUY62553.1 Flavivirus capsid protein C | 1110 | >ANB66183.1 capsid protein C |
| 854 | >AWH65848.1 Flavivirus capsid protein C | 1111 | >ANB66183.1 Flavivirus capsid protein C |
| 855 | >AWH65849.1 Flavivirus capsid protein C | 1112 | >ANB66184.1 capsid protein C |
| 856 | >AWF93617.1 capsid protein C | 1113 | >ANA12599.1 Flavivirus capsid protein C |
| 857 | >AWF93617.1 Flavivirus capsid protein C | 1114 | >AMX81919.1 Flavivirus capsid protein C |
| 858 | >AWF93618.1 capsid protein C | 1115 | >AMR39832.1 Flavivirus capsid protein C |
| 859 | >AWF93618.1 Flavivirus capsid protein C | 1116 | >AMR39833.1 Flavivirus capsid protein C |
| 860 | >AWF93619.1 capsid protein C | 1117 | >AMR39834.1 Flavivirus capsid protein C |
| 861 | >AWF93619.1 Flavivirus capsid protein C | 1118 | >AMR39835.1 Flavivirus capsid protein C |
| 862 | >AWF93620.1 capsid protein C | 1119 | >AMR39836.1 Flavivirus capsid protein C |
| 863 | >AWF93620.1 Flavivirus capsid protein C | 1120 | >AMQ48986.1 Flavivirus capsid protein C |
| 864 | >AWF93621.1 capsid protein C | 1121 | >AMQ48981.1 anchored capsid protein C |
| 865 | >AWF93621.1 Flavivirus capsid protein C | 1122 | >AMQ48981.1 capsid protein C |
| 866 | >AWF93622.1 capsid protein C | 1123 | >AMQ48981.1 Flavivirus capsid protein C |
| 867 | >AWF93622.1 Flavivirus capsid protein C | 1124 | >AMQ48982.1 anchored capsid protein C |
| 868 | >AWF93623.1 capsid protein C | 1125 | >AMQ48982.1 capsid protein C |
| 869 | >AWF93623.1 Flavivirus capsid protein C | 1126 | >AMQ48982.1 Flavivirus capsid protein C |
| 870 | >AWF93624.1 capsid protein C | 1127 | >AMQ34003.1 capsid |
| 871 | >AWF93624.1 Flavivirus capsid protein C | 1128 | >AMQ34003.1 Flavivirus capsid protein C |
| 872 | >AWF93625.1 capsid protein C | 1129 | >AMQ34004.1 capsid |
| 873 | >AWF93625.1 Flavivirus capsid protein C | 1130 | >AMQ34004.1 Flavivirus capsid protein C |
| 874 | >AWF93626.1 capsid protein C | 1131 | >AMN14619.1 Flavivirus capsid protein C |
| 875 | >AWF93626.1 Flavivirus capsid protein C | 1132 | >AMN14620.1 Flavivirus capsid protein C |
| 876 | >AWF93627.1 capsid protein C | 1133 | >AMM39806.1 Flavivirus capsid protein C |
| 877 | >AWF93627.1 Flavivirus capsid protein C | 1134 | >AMK79469.1 Flavivirus capsid protein C |
| 878 | >AWF93628.1 capsid protein C | 1135 | >AMD16557.1 Flavivirus capsid protein C |
| 879 | >AWF93628.1 Flavivirus capsid protein C | 1136 | >AMH87239.1 Flavivirus capsid protein C |
| 880 | >AWF93629.1 capsid protein C | 1137 | >AMB18850.1 Flavivirus capsid protein C |
| 881 | >AWF93629.1 Flavivirus capsid protein C | 1138 | >AMD61710.1 Flavivirus capsid protein C |
| 882 | >AWF93630.1 capsid protein C | 1139 | >AMD61711.1 Flavivirus capsid protein C |
| 883 | >AWF93630.1 Flavivirus capsid protein C | 1140 | >AMB37295.1 Flavivirus capsid protein C |
| 884 | >AWF93631.1 capsid protein C | 1141 | >AMC13911.1 Flavivirus capsid protein C |
| 885 | >AWF93631.1 Flavivirus capsid protein C | 1142 | >ALU33341.1 capsid |
| 886 | >AWF93632.1 capsid protein C | 1143 | >ALU33341.1 Flavivirus capsid protein C |
| 887 | >AWF93632.1 Flavivirus capsid protein C | 1144 | >BAP47441.1 Flavivirus capsid protein C |
| 888 | >AWF93633.1 capsid protein C | 1145 | >AHZ13508.1 Flavivirus capsid protein C |
| 889 | >AWF93633.1 Flavivirus capsid protein C | 1146 | >AAV34151.1 Flavivirus capsid protein C |
| 890 | >AWF93634.1 capsid protein C | | |

TABLE 1E
Non-limiting example Envelope protein (E) sequences

| SEQ | Zika viruses with example Envelope |
|---|---|
| ID NO | protein (E) sequences |
| 1147 | >YP_009430300.1 envelope protein E |
| 1148 | >YP_009430300.1 Flavi_E_C |
| 1149 | >YP_009430300.1 flavi_E_stem |
| 1150 | >YP_009428568.1 envelope protein E |
| 1151 | >YP_009428568.1 Flavi_glycoprot |
| 1152 | >YP_009428568.1 Flavi_E_C |
| 1153 | >YP_009428568.1 flavi_E_stem |
| 1154 | >YP_009227198.1 envelope protein E |
| 1155 | >YP_009227198.1 Flavi_E_C |
| 1156 | >YP_009227198.1 flavi_E_stem |
| 1157 | >YP_002790881.1 envelope protein E |
| 1158 | >YP_002790881.1 Flavi_E_C |
| 1159 | >YP_002790881.1 flavi_E_stem |
| 1160 | >UHI99865.1 envelope protein E |
| 1161 | >UHI99865.1 Flavi_E_C |
| 1162 | >UHI99865.1 flavi_E_stem |
| 1163 | >UHI99866.1 envelope protein E |
| 1164 | >UHI99866.1 Flavi_E_C |
| 1165 | >UHI99866.1 flavi_E_stem |
| 1166 | >UHI99867.1 envelope protein E |
| 1167 | >UED15620.1 envelope protein E |
| 1168 | >UED15620.1 Flavi_E_C |
| 1169 | >UED15620.1 flavi_E_stem |
| 1170 | >UBI73854.1 envelope protein E |
| 1171 | >UBI73854.1 Flavi_E_C |
| 1172 | >UBI73854.1 flavi_E_stem |
| 1173 | >QKF93428.1 envelope protein E |
| 1174 | >QKF93428.1 Flavi_E_C |
| 1175 | >QKF93428.1 flavi_E_stem |
| 1176 | >QKF93429.1 envelope protein E |
| 1177 | >QKF93429.1 Flavi_E_C |
| 1178 | >QKF93429.1 flavi_E_stem |
| 1179 | >QKF93430.1 envelope protein E |
| 1180 | >QKF93430.1 Flavi_E_C |
| 1181 | >QKF93430.1 flavi_E_stem |
| 1182 | >QKF93431.1 envelope protein E |
| 1183 | >QKF93431.1 Flavi_E_C |
| 1184 | >QKF93431.1 flavi_E_stem |
| 1185 | >QKF93432.1 envelope protein E |
| 1186 | >QKF93432.1 Flavi_E_C |
| 1187 | >QKF93432.1 flavi_E_stem |
| 1188 | >QKF93433.1 envelope protein E |
| 1189 | >QKF93433.1 Flavi_E_C |
| 1190 | >QKF93433.1 flavi_E_stem |
| 1191 | >QKF93434.1 envelope protein E |
| 1192 | >QKF93434.1 Flavi_E_C |
| 1193 | >QKF93434.1 flavi_E_stem |
| 1194 | >QKF93435.1 envelope protein E |
| 1195 | >QKF93435.1 Flavi_E_C |
| 1196 | >QKF93435.1 flavi_E_stem |
| 1197 | >QKF93436.1 envelope protein E |
| 1198 | >QKF93436.1 Flavi_E_C |
| 1199 | >QKF93436.1 flavi_E_stem |
| 1200 | >QKF93437.1 envelope protein E |
| 1201 | >QKF93437.1 Flavi_E_C |
| 1202 | >QKF93437.1 flavi_E_stem |
| 1203 | >QKF93438.1 envelope protein E |
| 1204 | >QKF93438.1 Flavi_E_C |
| 1205 | >QKF93438.1 flavi_E_stem |
| 1206 | >QKF93439.1 envelope protein E |
| 1207 | >QKF93439.1 Flavi_E_C |
| 1208 | >QKF93439.1 flavi_E_stem |
| 1209 | >QKF93440.1 envelope protein E |
| 1210 | >QKF93440.1 Flavi_E_C |
| 1211 | >QKF93440.1 flavi_E_stem |
| 1212 | >QKF93441.1 envelope protein E |
| 1213 | >QKF93441.1 Flavi_E_C |
| 1214 | >QKF93441.1 flavi_E_stem |
| 1215 | >QVL61761.1 Flavi_E_C |
| 1216 | >QVL61761.1 flavi_E_stem |
| 1217 | >QPC45464.1 Flavi_E_C |
| 1218 | >QPC45464.1 flavi_E_stem |
| 1219 | >QTA38993.1 envelope protein E |
| 1220 | >QTA38993.1 Flavi_E_C |
| 1221 | >QTA38993.1 flavi_E_stem |
| 1222 | >QTA38994.1 envelope protein E |
| 1223 | >QTA38994.1 Flavi_E_C |
| 1224 | >QTA38994.1 flavi_E_stem |
| 1225 | >QOF88708.1 envelope protein E |
| 1226 | >QOF88708.1 Flavi_E_C |
| 1227 | >QOF88708.1 flavi_E_stem |
| 1228 | >QLI34051.1 Flavi_E_C |
| 1229 | >QLI34051.1 flavi_E_stem |
| 1230 | >QKX95861.1 envelope protein E |
| 1231 | >QKX95861.1 Flavi_E_C |
| 1232 | >QKX95861.1 flavi_E_stem |
| 1233 | >QKU35968.1 envelope protein E |
| 1234 | >QKU35968.1 Flavi_E_C |
| 1235 | >QKU35968.1 flavi_E_stem |
| 1236 | >QKM77298.1 envelope protein E |
| 1237 | >QKM77298.1 Flavi_E_C |
| 1238 | >QKM77298.1 flavi_E_stem |
| 1239 | >QKM77299.1 envelope protein E |
| 1240 | >QKM77299.1 Flavi_E_C |
| 1241 | >QKM77299.1 flavi_E_stem |
| 1242 | >QKM77300.1 envelope protein E |
| 1243 | >QKM77300.1 Flavi_E_C |
| 1244 | >QKM77300.1 flavi_E_stem |
| 1245 | >QKM77301.1 envelope protein E |
| 1246 | >QKM77301.1 Flavi_E_C |
| 1247 | >QKM77301.1 flavi_E_stem |
| 1248 | >QBM11757.1 Flavi_E_C |
| 1249 | >QBM11757.1 flavi_E_stem |
| 1250 | >AZS35403.1 Flavi_E_C |
| 1251 | >AZS35403.1 flavi_E_stem |
| 1252 | >AZS35404.1 Flavi_E_C |
| 1253 | >AZS35404.1 flavi_E_stem |
| 1254 | >AZS35405.1 Flavi_E_C |
| 1255 | >AZS35405.1 flavi_E_stem |
| 1256 | >QGA72951.1 envelope protein E |
| 1257 | >QGA72951.1 Flavi_E_C |
| 1258 | >QGA72951.1 flavi_E_stem |
| 1259 | >QGA67050.1 envelope protein E |
| 1260 | >QGA67050.1 Flavi_E_C |
| 1261 | >QGA67050.1 flavi_E_stem |
| 1262 | >QGA67051.1 envelope protein E |
| 1263 | >QGA67051.1 Flavi_E_C |
| 1264 | >QGA67051.1 flavi_E_stem |
| 1265 | >QGA67052.1 envelope protein E |
| 1266 | >QGA67052.1 Flavi_E_C |
| 1267 | >QGA67052.1 flavi_E_stem |
| 1268 | >QGA67053.1 envelope protein E |
| 1269 | >QGA67053.1 Flavi_E_C |
| 1270 | >QGA67053.1 flavi_E_stem |
| 1271 | >QGA67054.1 envelope protein E |
| 1272 | >QGA67054.1 Flavi_E_C |
| 1273 | >QGA67054.1 flavi_E_stem |
| 1274 | >QGA67055.1 envelope protein E |
| 1275 | >QGA67055.1 Flavi_E_C |
| 1276 | >QGA67055.1 flavi_E_stem |
| 1277 | >QGA67056.1 envelope protein E |
| 1278 | >QGA67056.1 Flavi_E_C |
| 1279 | >QGA67056.1 flavi_E_stem |
| 1280 | >QFZ95661.1 envelope protein E |
| 1281 | >QFZ95661.1 Flavi_E_C |
| 1282 | >QFZ95661.1 flavi_E_stem |
| 1283 | >QDZ58854.1 Flavi_E_C |
| 1284 | >QDZ58854.1 flavi_E_stem |
| 1285 | >QDZ58855.1 Flavi_E_C |
| 1286 | >QDZ58855.1 flavi_E_stem |
| 1287 | >QDZ58856.1 Flavi_E_C |
| 1288 | >QDZ58856.1 flavi_E_stem |
| 1289 | >AXQ39996.1 envelope protein E |
| 1290 | >AXQ39996.1 Flavi_E_C |
| 1291 | >AXQ39996.1 flavi_E_stem |
| 1292 | >AXQ39997.1 envelope protein E |
| 1293 | >AXQ39997.1 Flavi_E_C |
| 1294 | >AXQ39997.1 flavi_E_stem |
| 1295 | >AXQ39998.1 envelope protein E |
| 1296 | >AXQ39998.1 Flavi_E_C |
| 1297 | >AXQ39998.1 flavi_E_stem |
| 1298 | >AXQ39999.1 envelope protein E |
| 1299 | >AXQ39999.1 Flavi_E_C |
| 1300 | >AXQ39999.1 flavi_E_stem |
| 1301 | >AXQ40000.1 envelope protein E |
| 1302 | >AXQ40000.1 Flavi_E_C |
| 1303 | >AXQ40000.1 flavi_E_stem |
| 1304 | >AXQ40001.1 envelope protein E |
| 1305 | >AXQ40001.1 Flavi_E_C |
| 1306 | >AXQ40001.1 flavi_E_stem |
| 1307 | >AXQ40002.1 envelope protein E |
| 1308 | >AXQ40002.1 Flavi_E_C |
| 1309 | >AXQ40002.1 flavi_E_stem |
| 1310 | >AXQ40003.1 envelope protein E |
| 1311 | >AXQ40003.1 Flavi_E_C |
| 1312 | >AXQ40003.1 flavi_E_stem |
| 1313 | >AXQ40004.1 envelope protein E |
| 1314 | >AXQ40004.1 Flavi_E_C |
| 1315 | >AXQ40004.1 flavi_E_stem |
| 1316 | >AXQ40005.1 envelope protein E |
| 1317 | >AXQ40005.1 Flavi_E_C |
| 1318 | >AXQ40005.1 flavi_E_stem |
| 1319 | >AXQ40006.1 envelope protein E |
| 1320 | >AXQ40006.1 Flavi_E_C |
| 1321 | >AXQ40006.1 flavi_E_stem |
| 1322 | >AXQ40007.1 envelope protein E |
| 1323 | >AXQ40007.1 Flavi_E_C |
| 1324 | >AXQ40007.1 flavi_E_stem |
| 1325 | >QDH45910.1 Flavi_E_C |
| 1326 | >QDH45910.1 flavi_E_stem |
| 1327 | >QCG74166.1 Flavi_E_C |
| 1328 | >QCG74166.1 flavi_E_stem |
| 1329 | >AYV74916.1 Flavi_glycoprot |
| 1330 | >AYV74916.1 Flavi_E_C |
| 1331 | >AYV74916.1 flavi_E_stem |
| 1332 | >AYV74917.1 Flavi_glycoprot |
| 1333 | >AYV74917.1 Flavi_E_C |
| 1334 | >AYV74917.1 flavi_E_stem |
| 1335 | >AYV74918.1 Flavi_glycoprot |
| 1336 | >AYV74918.1 Flavi_E_C |
| 1337 | >AYV74918.1 flavi_E_stem |
| 1338 | >AYV74919.1 Flavi_glycoprot |
| 1339 | >AYV74919.1 Flavi_E_C |
| 1340 | >AYV74919.1 flavi_E_stem |
| 1341 | >AYV74920.1 Flavi_glycoprot |
| 1342 | >AYV74920.1 Flavi_E_C |
| 1343 | >AYV74920.1 flavi_E_stem |
| 1344 | >AYV74921.1 Flavi_glycoprot |
| 1345 | >AYV74921.1 Flavi_E_C |
| 1346 | >AYV74921.1 flavi_E_stem |
| 1347 | >AYV74922.1 Flavi_glycoprot |
| 1348 | >AYV74922.1 Flavi_E_C |
| 1349 | >AYV74922.1 flavi_E_stem |
| 1350 | >AYV74923.1 Flavi_glycoprot |
| 1351 | >AYV74923.1 Flavi_E_C |
| 1352 | >AYV74923.1 flavi_E_stem |
| 1353 | >AYV74924.1 Flavi_glycoprot |
| 1354 | >AYV74924.1 Flavi_E_C |
| 1355 | >AYV74924.1 flavi_E_stem |
| 1356 | >AYV74925.1 Flavi_glycoprot |
| 1357 | >AYV74925.1 Flavi_E_C |
| 1358 | >AYV74925.1 flavi_E_stem |
| 1359 | >AYV74927.1 Flavi_glycoprot |
| 1360 | >AYV74927.1 Flavi_E_C |
| 1361 | >AYV74927.1 flavi_E_stem |
| 1362 | >AYV74928.1 Flavi_glycoprot |
| 1363 | >AYV74928.1 Flavi_E_C |
| 1364 | >AYV74928.1 flavi_E_stem |
| 1365 | >AYV74929.1 Flavi_glycoprot |
| 1366 | >AYV74929.1 Flavi_E_C |
| 1367 | >AYV74929.1 flavi_E_stem |
| 1368 | >AYV74930.1 Flavi_glycoprot |
| 1369 | >AYV74930.1 Flavi_E_C |
| 1370 | >AYV74930.1 flavi_E_stem |
| 1371 | >AYV74931.1 Flavi_glycoprot |
| 1372 | >AYV74931.1 Flavi_E_C |
| 1373 | >AYV74931.1 flavi_E_stem |
| 1374 | >AYV74932.1 Flavi_glycoprot |
| 1375 | >AYV74932.1 Flavi_E_C |
| 1376 | >AYV74932.1 flavi_E_stem |
| 1377 | >AYV74933.1 Flavi_glycoprot |
| 1378 | >AYV74933.1 Flavi_E_C |
| 1379 | >AYV74933.1 flavi_E_stem |
| 1380 | >AYV74934.1 Flavi_glycoprot |
| 1381 | >AYV74934.1 Flavi_E_C |
| 1382 | >AYV74934.1 flavi_E_stem |
| 1383 | >AYV74935.1 Flavi_glycoprot |
| 1384 | >AYV74935.1 Flavi_E_C |
| 1385 | >AYV74935.1 flavi_E_stem |
| 1386 | >AYV74936.1 Flavi_glycoprot |
| 1387 | >AYV74936.1 Flavi_E_C |
| 1388 | >AYV74936.1 flavi_E_stem |
| 1389 | >AYV74937.1 Flavi_glycoprot |
| 1390 | >AYV74937.1 Flavi_E_C |
| 1391 | >AYV74937.1 flavi_E_stem |
| 1392 | >AYU74865.1 Flavi_glycoprot |
| 1393 | >AYU74865.1 Flavi_E_C |
| 1394 | >AYU74865.1 flavi_E_stem |
| 1395 | >ATB53753.1 Flavi_E_C |
| 1396 | >ATB53753.1 flavi_E_stem |
| 1397 | >ATB53754.1 Flavi_glycoprot |
| 1398 | >ATB53754.1 Flavi_E_C |
| 1399 | >ATB53754.1 flavi_E_stem |
| 1400 | >AVC63697.1 Flavi_glycoprot |
| 1401 | >AVC63697.1 Flavi_E_C |
| 1402 | >AVC63697.1 flavi_E_stem |
| 1403 | >AVC63698.1 Flavi_glycoprot |
| 1404 | >AVC63698.1 Flavi_E_C |
| 1405 | >AVC63698.1 flavi_E_stem |
| 1406 | >AYI50273.1 envelope protein E |
| 1407 | >AYI50273.1 Flavi_glycoprot |
| 1408 | >AYI50273.1 Flavi_E_C |
| 1409 | >AYI50273.1 flavi_E_stem |
| 1410 | >AYI50274.1 envelope protein E |
| 1411 | >AYI50274.1 Flavi_glycoprot |
| 1412 | >AYI50274.1 Flavi_E_C |
| 1413 | >AYI50274.1 flavi_E_stem |
| 1414 | >AYI50275.1 envelope protein E |
| 1415 | >AYI50275.1 Flavi_glycoprot |
| 1416 | >AYI50275.1 Flavi_E_C |
| 1417 | >AYI50275.1 flavi_E_stem |
| 1418 | >ASR91936.1 Flavi_glycoprot |
| 1419 | >ASR91936.1 Flavi_E_C |
| 1420 | >ASR91936.1 flavi_E_stem |
| 1421 | >AXF50014.1 Flavi_glycoprot |
| 1422 | >AXF50014.1 Flavi_E_C |
| 1423 | >AXF50014.1 flavi_E_stem |
| 1424 | >AXF50015.1 Flavi_E_C |
| 1425 | >AXF50015.1 flavi_E_stem |
| 1426 | >AXF50016.1 Flavi_glycoprot |
| 1427 | >AXF50016.1 Flavi_E_C |
| 1428 | >AXF50016.1 flavi_E_stem |
| 1429 | >AXF50052.1 Flavi_glycoprot |
| 1430 | >AXF50052.1 Flavi_E_C |
| 1431 | >AXF50052.1 flavi_E_stem |
| 1432 | >ATL14618.1 Flavi_E_C |
| 1433 | >ATL14618.1 flavi_E_stem |
| 1434 | >AUF35021.1 Flavi_glycoprot |
| 1435 | >AUF35021.1 Flavi_E_C |
| 1436 | >AUF35021.1 flavi_E_stem |
| 1437 | >AUF35022.1 Flavi_glycoprot |
| 1438 | >AUF35022.1 Flavi_E_C |
| 1439 | >AUF35022.1 flavi_E_stem |
| 1440 | >AVG19202.1 Flavi_glycoprot |
| 1441 | >AVG19202.1 Flavi_E_C |
| 1442 | >AVG19202.1 flavi_E_stem |
| 1443 | >AVG19203.1 Flavi_glycoprot |
| 1444 | >AVG19203.1 Flavi_E_C |
| 1445 | >AVG19203.1 flavi_E_stem |
| 1446 | >AVV62004.1 Flavi_glycoprot |
| 1447 | >AVV62004.1 Flavi_E_C |
| 1448 | >AVV62004.1 flavi_E_stem |
| 1449 | >ARU07074.1 Flavi_glycoprot |
| 1450 | >ARU07074.1 Flavi_E_C |
| 1451 | >ARU07074.1 flavi_E_stem |
| 1452 | >ARU07075.1 Flavi_glycoprot |
| 1453 | >ARU07075.1 Flavi_E_C |
| 1454 | >ARU07075.1 flavi_E_stem |
| 1455 | >ARU07076.1 Flavi_glycoprot |
| 1456 | >ARU07076.1 Flavi_E_C |
| 1457 | >ARU07076.1 flavi_E_stem |
| 1458 | >AUY62552.1 Flavi_E_C |
| 1459 | >AUY62552.1 flavi_E_stem |
| 1460 | >AUY62553.1 Flavi_glycoprot |
| 1461 | >AUY62553.1 Flavi_E_C |
| 1462 | >AUY62553.1 flavi_E_stem |
| 1463 | >AWH65848.1 Flavi_E_C |
| 1464 | >AWH65848.1 flavi_E_stem |
| 1465 | >AWH65849.1 Flavi_glycoprot |
| 1466 | >AWH65849.1 Flavi_E_C |
| 1467 | >AWH65849.1 flavi_E_stem |
| 1468 | >AWF93617.1 envelope protein E |
| 1469 | >AWF93617.1 Flavi_glycoprot |
| 1470 | >AWF93617.1 Flavi_E_C |
| 1471 | >AWF93617.1 flavi_E_stem |
| 1472 | >AWF93618.1 envelope protein E |
| 1473 | >AWF93618.1 Flavi_glycoprot |
| 1474 | >AWF93618.1 Flavi_E_C |
| 1475 | >AWF93618.1 flavi_E_stem |
| 1476 | >AWF93619.1 envelope protein E |
| 1477 | >AWF93619.1 Flavi_glycoprot |
| 1478 | >AWF93619.1 Flavi_E_C |
| 1479 | >AWF93619.1 flavi_E_stem |
| 1480 | >AWF93620.1 envelope protein E |
| 1481 | >AWF93620.1 Flavi_glycoprot |
| 1482 | >AWF93620.1 Flavi_E_C |
| 1483 | >AWF93620.1 flavi_E_stem |
| 1484 | >AWF93621.1 envelope protein E |
| 1485 | >AWF93621.1 Flavi_glycoprot |
| 1486 | >AWF93621.1 Flavi_E_C |
| 1487 | >AWF93621.1 flavi_E_stem |
| 1488 | >AWF93622.1 envelope protein E |
| 1489 | >AWF93622.1 Flavi_glycoprot |
| 1490 | >AWF93622.1 Flavi_E_C |
| 1491 | >AWF93622.1 flavi_E_stem |
| 1492 | >AWF93623.1 envelope protein E |
| 1493 | >AWF93623.1 Flavi_glycoprot |
| 1494 | >AWF93623.1 Flavi_E_C |
| 1495 | >AWF93623.1 flavi_E_stem |
| 1496 | >AWF93624.1 envelope protein E |
| 1497 | >AWF93624.1 Flavi_glycoprot |
| 1498 | >AWF93624.1 Flavi_E_C |
| 1499 | >AWF93624.1 flavi_E_stem |
| 1500 | >AWF93625.1 envelope protein E |
| 1501 | >AWF93625.1 Flavi_glycoprot |
| 1502 | >AWF93625.1 Flavi_E_C |
| 1503 | >AWF93625.1 flavi_E_stem |
| 1504 | >AWF93626.1 envelope protein E |
| 1505 | >AWF93626.1 Flavi_glycoprot |
| 1506 | >AWF93626.1 Flavi_E_C |
| 1507 | >AWF93626.1 flavi_E_stem |
| 1508 | >AWF93627.1 envelope protein E |
| 1509 | >AWF93627.1 Flavi_glycoprot |
| 1510 | >AWF93627.1 Flavi_E_C |
| 1511 | >AWF93627.1 flavi_E_stem |
| 1512 | >AWF93628.1 envelope protein E |
| 1513 | >AWF93628.1 Flavi_glycoprot |
| 1514 | >AWF93628.1 Flavi_E_C |
| 1515 | >AWF93628.1 flavi_E_stem |
| 1516 | >AWF93629.1 envelope protein E |
| 1517 | >AWF93629.1 Flavi_glycoprot |
| 1518 | >AWF93629.1 Flavi_E_C |
| 1519 | >AWF93629.1 flavi_E_stem |
| 1520 | >AWF93630.1 envelope protein E |
| 1521 | >AWF93630.1 Flavi_glycoprot |
| 1522 | >AWF93630.1 Flavi_E_C |
| 1523 | >AWF93630.1 flavi_E_stem |
| 1524 | >AWF93631.1 envelope protein E |
| 1525 | >AWF93631.1 Flavi_glycoprot |
| 1526 | >AWF93631.1 Flavi_E_C |
| 1527 | >AWF93631.1 flavi_E_stem |
| 1528 | >AWF93632.1 envelope protein E |
| 1529 | >AWF93632.1 Flavi_glycoprot |
| 1530 | >AWF93632.1 Flavi_E_C |
| 1531 | >AWF93632.1 flavi_E stem |
| 1532 | >AWF93633.1 envelope protein E |
| 1533 | >AWF93633.1 Flavi_glycoprot |
| 1534 | >AWF93633.1 Flavi_E_C |
| 1535 | >AWF93633.1 flavi_E_stem |
| 1536 | >AWF93634.1 envelope protein E |
| 1537 | >AWF93634.1 Flavi_glycoprot |
| 1538 | >AWF93634.1 Flavi_E_C |
| 1539 | >AWF93634.1 flavi_E_stem |
| 1540 | >AWF93635.1 envelope protein E |
| 1541 | >AWF93635.1 Flavi_glycoprot |
| 1542 | >AWF93635.1 Flavi_E_C |
| 1543 | >AWF93635.1 flavi_E_stem |
| 1544 | >AVZ47169.1 Flavi_glycoprot |
| 1545 | >AVZ47169.1 Flavi_E_C |
| 1546 | >AVZ47169.1 flavi_E_stem |
| 1547 | >AVW85800.1 envelope protein E |
| 1548 | >AVW85800.1 Flavi_glycoprot |
| 1549 | >AVW85800.1 Flavi_E_C |
| 1550 | >AVW85800.1 flavi_E_stem |
| 1551 | >AVW85801.1 envelope protein E |
| 1552 | >AVW85801.1 Flavi_glycoprot |
| 1553 | >AVW85801.1 Flavi_E_C |
| 1554 | >AVW85801.1 flavi_E_stem |
| 1555 | >AVW85802.1 envelope protein E |
| 1556 | >AVW85802.1 Flavi_glycoprot |
| 1557 | >AVW85802.1 Flavi_E_C |
| 1558 | >AVW85802.1 flavi_E_stem |
| 1559 | >AVW85803.1 envelope protein E |
| 1560 | >AVW85803.1 Flavi_glycoprot |
| 1561 | >AVW85803.1 Flavi_E_C |
| 1562 | >AVW85803.1 flavi_E_stem |
| 1563 | >AVW85804.1 envelope protein E |
| 1564 | >AVW85804.1 Flavi_glycoprot |
| 1565 | >AVW85804.1 Flavi_E_C |
| 1566 | >AVW85804.1 flavi_E_stem |
| 1567 | >AVW85805.1 envelope protein E |
| 1568 | >AVW85805.1 Flavi_glycoprot |
| 1569 | >AVW85805.1 Flavi_E_C |
| 1570 | >AVW85805.1 flavi_E_stem |
| 1571 | >AVW85806.1 envelope protein E |
| 1572 | >AVW85806.1 Flavi_glycoprot |
| 1573 | >AVW85806.1 Flavi_E_C |
| 1574 | >AVW85806.1 flavi_E_stem |
| 1575 | >AVW85807.1 envelope protein E |
| 1576 | >AVW85807.1 Flavi_glycoprot |
| 1577 | >AVW85807.1 Flavi_E_C |
| 1578 | >AVW85807.1 flavi_E_stem |
| 1579 | >AVW85808.1 envelope protein E |
| 1580 | >AVW85808.1 Flavi_glycoprot |
| 1581 | >AVW85808.1 Flavi_E_C |
| 1582 | >AVW85808.1 flavi_E_stem |
| 1583 | >AVW85809.1 envelope protein E |
| 1584 | >AVW85809.1 Flavi_glycoprot |
| 1585 | >AVW85809.1 Flavi_E_C |
| 1586 | >AVW85809.1 flavi_E_stem |
| 1587 | >AVW85810.1 envelope protein E |
| 1588 | >AVW85810.1 Flavi_glycoprot |
| 1589 | >AVW85810.1 Flavi_E_C |
| 1590 | >AVW85810.1 flavi_E_stem |
| 1591 | >AVW85811.1 envelope protein E |
| 1592 | >AVW85811.1 Flavi_glycoprot |
| 1593 | >AVW85811.1 Flavi_E_C |
| 1594 | >AVW85811.1 flavi_E_stem |
| 1595 | >AVW85812.1 envelope protein E |
| 1596 | >AVW85812.1 Flavi_glycoprot |
| 1597 | >AVW85812.1 Flavi_E_C |
| 1598 | >AVW85812.1 flavi_E_stem |
| 1599 | >AVW85813.1 envelope protein E |
| 1600 | >AVW85813.1 Flavi_glycoprot |
| 1601 | >AVW85813.1 Flavi_E_C |
| 1602 | >AVW85813.1 flavi_E_stem |
| 1603 | >AVW85814.1 envelope protein E |
| 1604 | >AVW85814.1 Flavi_glycoprot |
| 1605 | >AVW85814.1 Flavi_E_C |
| 1606 | >AVW85814.1 flavi_E_stem |
| 1607 | >AVW85815.1 envelope protein E |
| 1608 | >AVW85815.1 Flavi_glycoprot |
| 1609 | >AVW85815.1 Flavi_E_C |
| 1610 | >AVW85815.1 flavi_E_stem |
| 1611 | >AVW85816.1 envelope protein E |
| 1612 | >AVW85816.1 Flavi_glycoprot |
| 1613 | >AVW85816.1 Flavi_E_C |
| 1614 | >AVW85816.1 flavi_E_stem |
| 1615 | >AVW85817.1 envelope protein E |
| 1616 | >AVW85817.1 Flavi_glycoprot |
| 1617 | >AVW85817.1 Flavi_E_C |
| 1618 | >AVW85817.1 flavi_E_stem |
| 1619 | >AVW85818.1 envelope protein E |
| 1620 | >AVW85818.1 Flavi_glycoprot |
| 1621 | >AVW85818.1 Flavi_E_C |
| 1622 | >AVW85818.1 flavi_E_stem |
| 1623 | >AVW85819.1 envelope protein E |
| 1624 | >AVW85819.1 Flavi_glycoprot |
| 1625 | >AVW85819.1 Flavi_E_C |
| 1626 | >AVW85819.1 flavi_E_stem |
| 1627 | >AVW85820.1 envelope protein E |
| 1628 | >AVW85820.1 Flavi_glycoprot |
| 1629 | >AVW85820.1 Flavi_E_C |
| 1630 | >AVW85820.1 flavi_E_stem |
| 1631 | >AVW85821.1 envelope protein E |
| 1632 | >AVW85821.1 Flavi_glycoprot |
| 1633 | >AVW85821.1 Flavi_E_C |
| 1634 | >AVW85821.1 flavi_E_stem |
| 1635 | >AVW85822.1 envelope protein E |
| 1636 | >AVW85822.1 Flavi_glycoprot |
| 1637 | >AVW85822.1 Flavi_E_C |
| 1638 | >AVW85822.1 flavi_E_stem |
| 1639 | >AVW85823.1 envelope protein E |
| 1640 | >AVW85823.1 Flavi_glycoprot |
| 1641 | >AVW85823.1 Flavi_E_C |
| 1642 | >AVW85823.1 flavi_E_stem |
| 1643 | >AVW85824.1 envelope protein E |
| 1644 | >AVW85824.1 Flavi_glycoprot |
| 1645 | >AVW85824.1 Flavi_E_C |
| 1646 | >AVW85824.1 flavi_E_stem |
| 1647 | >AVW85825.1 envelope protein E |
| 1648 | >AVW85825.1 Flavi_glycoprot |
| 1649 | >AVW85825.1 Flavi_E_C |
| 1650 | >AVW85825.1 flavi_E_stem |
| 1651 | >AVW85826.1 envelope protein E |
| 1652 | >AVW85826.1 Flavi_glycoprot |
| 1653 | >AVW85826.1 Flavi_E_C |
| 1654 | >AVW85826.1 flavi_E_stem |
| 1655 | >AVW85827.1 envelope protein E |
| 1656 | >AVW85827.1 Flavi_glycoprot |
| 1657 | >AVW85827.1 Flavi_E_C |
| 1658 | >AVW85827.1 flavi_E_stem |
| 1659 | >AVW85828.1 envelope protein E |
| 1660 | >AVW85828.1 Flavi_glycoprot |
| 1661 | >AVW85828.1 Flavi_E_C |
| 1662 | >AVW85828.1 flavi_E_stem |
| 1663 | >AVW85829.1 envelope protein E |
| 1664 | >AVW85829.1 Flavi_glycoprot |
| 1665 | >AVW85829.1 Flavi_E_C |
| 1666 | >AVW85829.1 flavi_E_stem |
| 1667 | >AVW85830.1 envelope protein E |
| 1668 | >AVW85830.1 Flavi_glycoprot |
| 1669 | >AVW85830.1 Flavi_E_C |
| 1670 | >AVW85830.1 flavi_E_stem |
| 1671 | >AVW85831.1 envelope protein E |
| 1672 | >AVW85831.1 Flavi_glycoprot |
| 1673 | >AVW85831.1 Flavi_E_C |
| 1674 | >AVW85831.1 flavi_E_stem |
| 1675 | >AVW85832.1 envelope protein E |
| 1676 | >AVW85832.1 Flavi_glycoprot |
| 1677 | >AVW85832.1 Flavi_E_C |
| 1678 | >AVW85832.1 flavi_E_stem |
| 1679 | >AVW85833.1 envelope protein E |
| 1680 | >AVW85833.1 Flavi_glycoprot |
| 1681 | >AVW85833.1 Flavi_E_C |
| 1682 | >AVW85833.1 flavi_E_stem |
| 1683 | >AVW85834.1 envelope protein E |
| 1684 | >AVW85834.1 Flavi_glycoprot |
| 1685 | >AVW85834.1 Flavi_E_C |
| 1686 | >AVW85834.1 flavi_E_stem |
| 1687 | >AVW85835.1 envelope protein E |
| 1688 | >AVW85835.1 Flavi_glycoprot |
| 1689 | >AVW85835.1 Flavi_E_C |
| 1690 | >AVW85835.1 flavi_E_stem |
| 1691 | >AVW85836.1 envelope protein E |
| 1692 | >AVW85836.1 Flavi_glycoprot |
| 1693 | >AVW85836.1 Flavi_E_C |
| 1694 | >AVW85836.1 flavi_E_stem |
| 1695 | >AVW85837.1 envelope protein E |
| 1696 | >AVW85837.1 Flavi_glycoprot |
| 1697 | >AVW85837.1 Flavi_E_C |
| 1698 | >AVW85837.1 flavi_E_stem |
| 1699 | >AVW85838.1 envelope protein E |
| 1700 | >AVW85838.1 Flavi_glycoprot |
| 1701 | >AVW85838.1 Flavi_E_C |
| 1702 | >AVW85838.1 flavi_E_stem |
| 1703 | >AVW85839.1 envelope protein E |
| 1704 | >AVW85839.1 Flavi_glycoprot |
| 1705 | >AVW85839.1 Flavi_E_C |
| 1706 | >AVW85839.1 flavi_E_stem |
| 1707 | >AVW85840.1 envelope protein E |
| 1708 | >AVW85840.1 Flavi_glycoprot |
| 1709 | >AVW85840.1 Flavi_E_C |
| 1710 | >AVW85840.1 flavi_E_stem |
| 1711 | >AVW85841.1 envelope protein E |
| 1712 | >AVW85841.1 Flavi_glycoprot |
| 1713 | >AVW85841.1 Flavi_E_C |
| 1714 | >AVW85841.1 flavi_E_stem |
| 1715 | >AVW85842.1 envelope protein E |
| 1716 | >AVW85842.1 Flavi_glycoprot |
| 1717 | >AVW85842.1 Flavi_E_C |
| 1718 | >AVW85842.1 flavi_E_stem |
| 1719 | >AVW85843.1 envelope protein E |
| 1720 | >AVW85843.1 Flavi_glycoprot |
| 1721 | >AVW85843.1 Flavi_E_C |
| 1722 | >AVW85843.1 flavi_E_stem |
| 1723 | >AVW85844.1 envelope protein E |
| 1724 | >AVW85844.1 Flavi_glycoprot |
| 1725 | >AVW85844.1 Flavi_E_C |
| 1726 | >AVW85844.1 flavi_E_stem |
| 1727 | >AVW85845.1 envelope protein E |
| 1728 | >AVW85845.1 Flavi_glycoprot |
| 1729 | >AVW85845.1 Flavi_E_C |
| 1730 | >AVW85845.1 flavi_E_stem |
| 1731 | >AVW85846.1 envelope protein E |
| 1732 | >AVW85846.1 Flavi_glycoprot |
| 1733 | >AVW85846.1 Flavi_E_C |
| 1734 | >AVW85846.1 flavi_E_stem |
| 1735 | >AVW85847.1 envelope protein E |
| 1736 | >AVW85847.1 Flavi_glycoprot |
| 1737 | >AVW85847.1 Flavi_E_C |
| 1738 | >AVW85847.1 flavi_E_stem |
| 1739 | >AVW85848.1 envelope protein E |
| 1740 | >AVW85848.1 Flavi_glycoprot |
| 1741 | >AVW85848.1 Flavi_E_C |
| 1742 | >AVW85848.1 flavi_E_stem |
| 1743 | >AVW85849.1 envelope protein E |
| 1744 | >AVW85849.1 Flavi_glycoprot |
| 1745 | >AVW85849.1 Flavi_E_C |
| 1746 | >AVW85849.1 flavi_E_stem |
| 1747 | >AVW85850.1 envelope protein E |
| 1748 | >AVW85850.1 Flavi_glycoprot |
| 1749 | >AVW85850.1 Flavi_E_C |
| 1750 | >AVW85850.1 flavi_E_stem |
| 1751 | >AVW85851.1 envelope protein E |
| 1752 | >AVW85851.1 Flavi_glycoprot |
| 1753 | >AVW85851.1 Flavi_E_C |
| 1754 | >AVW85851.1 flavi_E_stem |
| 1755 | >AVW85852.1 envelope protein E |
| 1756 | >AVW85852.1 Flavi_glycoprot |
| 1757 | >AVW85852.1 Flavi_E_C |
| 1758 | >AVW85852.1 flavi_E_stem |
| 1759 | >AVW85853.1 envelope protein E |
| 1760 | >AVW85853.1 Flavi_glycoprot |
| 1761 | >AVW85853.1 Flavi_E_C |
| 1762 | >AVW85853.1 flavi_E_stem |
| 1763 | >AVW85854.1 envelope protein E |
| 1764 | >AVW85854.1 Flavi_glycoprot |
| 1765 | >AVW85854.1 Flavi_E_C |
| 1766 | >AVW85854.1 flavi_E_stem |
| 1767 | >AVW85855.1 envelope protein E |
| 1768 | >AVW85855.1 Flavi_glycoprot |
| 1769 | >AVW85855.1 Flavi_E_C |
| 1770 | >AVW85855.1 flavi_E_stem |
| 1771 | >AVW85856.1 envelope protein E |
| 1772 | >AVW85856.1 Flavi_glycoprot |
| 1773 | >AVW85856.1 Flavi_E_C |
| 1774 | >AVW85856.1 flavi_E_stem |
| 1775 | >AVW85857.1 envelope protein E |
| 1776 | >AVW85857.1 Flavi_glycoprot |
| 1777 | >AVW85857.1 Flavi_E_C |
| 1778 | >AVW85857.1 flavi_E_stem |
| 1779 | >AVW85858.1 envelope protein E |
| 1780 | >AVW85858.1 Flavi_glycoprot |
| 1781 | >AVW85858.1 Flavi_E_C |
| 1782 | >AVW85858.1 flavi_E_stem |
| 1783 | >AVW85859.1 envelope protein E |
| 1784 | >AVW85859.1 Flavi_glycoprot |
| 1785 | >AVW85859.1 Flavi_E_C |
| 1786 | >AVW85859.1 flavi_E_stem |
| 1787 | >AVW85860.1 envelope protein E |
| 1788 | >AVW85860.1 Flavi_glycoprot |
| 1789 | >AVW85860.1 Flavi_E_C |
| 1790 | >AVW85860.1 flavi_E_stem |
| 1791 | >AVW85861.1 envelope protein E |
| 1792 | >AVW85861.1 Flavi_glycoprot |
| 1793 | >AVW85861.1 Flavi_E_C |
| 1794 | >AVW85861.1 flavi_E_stem |
| 1795 | >AVW85862.1 envelope protein E |
| 1796 | >AVW85862.1 Flavi_glycoprot |
| 1797 | >AVW85862.1 Flavi_E_C |
| 1798 | >AVW85862.1 flavi_E_stem |
| 1799 | >AVW85863.1 envelope protein E |
| 1800 | >AVW85863.1 Flavi_glycoprot |
| 1801 | >AVW85863.1 Flavi_E_C |
| 1802 | >AVW85863.1 flavi_E_stem |
| 1803 | >BBC70847.1 Flavi_glycoprot |
| 1804 | >BBC70847.1 Flavi_E_C |
| 1805 | >BBC70847.1 flavi_E_stem |
| 1806 | >AVG19275.1 Flavi_glycoprot |
| 1807 | >AVG19275.1 Flavi_E_C |
| 1808 | >AVG19275.1 flavi_E_stem |
| 1809 | >AUI42329.1 Flavi_glycoprot |
| 1810 | >AUI42329.1 Flavi_E_C |
| 1811 | >AUI42329.1 flavi_E_stem |
| 1812 | >AUI42330.1 Flavi_glycoprot |
| 1813 | >AUI42330.1 Flavi_E_C |
| 1814 | >AUI42330.1 flavi_E_stem |
| 1815 | >ARB08102.1 Flavi_E_C |
| 1816 | >ARB08102.1 flavi_E_stem |
| 1817 | >ATB53752.1 Flavi_E_C |
| 1818 | >ATB53752.1 flavi_E_stem |
| 1819 | >AQS26698.1 Flavi_glycoprot |
| 1820 | >AQS26698.1 Flavi_E_C |
| 1821 | >AQS26698.1 flavi_E_stem |
| 1822 | >ASF57880.1 Flavi_E_C |
| 1823 | >ASF57880.1 flavi_E_stem |
| 1824 | >ASB32509.1 envelope protein E |
| 1825 | >ASB32509.1 Flavi_E_C |
| 1826 | >ASB32509.1 flavi_E_stem |
| 1827 | >APW84872.1 Flavi_E_C |
| 1828 | >APW84872.1 flavi_E_stem |
| 1829 | >APW84873.1 Flavi_E_C |
| 1830 | >APW84873.1 flavi_E_stem |
| 1831 | >APW84874.1 Flavi_E_C |
| 1832 | >APW84874.1 flavi_E_stem |
| 1833 | >APW84875.1 Flavi_E_C |
| 1834 | >APW84875.1 flavi_E_stem |
| 1835 | >APW84876.1 Flavi_E_C |
| 1836 | >APW84876.1 flavi_E_stem |
| 1837 | >APW84877.1 Flavi_E_C |
| 1838 | >APW84877.1 flavi_E_stem |
| 1839 | >ARM59239.1 Flavi_glycoprot |
| 1840 | >ARM59239.1 Flavi_E_C |
| 1841 | >ARM59239.1 flavi_E_stem |
| 1842 | >ARM59240.1 envelope protein E |
| 1843 | >ARM59240.1 Flavi_glycoprot |
| 1844 | >ARM59240.1 Flavi_E_C |
| 1845 | >ARM59240.1 flavi_E_stem |
| 1846 | >AMX81915.1 Flavi_glycoprot |
| 1847 | >AMX81915.1 Flavi_E_C |
| 1848 | >AMX81915.1 flavi_E_stem |
| 1849 | >AMX81916.1 Flavi_glycoprot |
| 1850 | >AMX81916.1 Flavi_E_C |
| 1851 | >AMX81916.1 flavi_E_stem |
| 1852 | >AMX81917.1 Flavi_glycoprot |
| 1853 | >AMX81917.1 Flavi_E_C |
| 1854 | >AMX81917.1 flavi_E_stem |
| 1855 | >AQZ41947.1 envelope protein E |
| 1856 | >AQZ41947.1 Flavi_E_C |
| 1857 | >AQZ41947.1 flavi_E_stem |
| 1858 | >AQZ41948.1 envelope protein E |
| 1859 | >AQZ41948.1 Flavi_E_C |
| 1860 | >AQZ41948.1 flavi_E_stem |
| 1861 | >AQZ41949.1 envelope protein E |
| 1862 | >AQZ41949.1 Flavi_glycoprot |
| 1863 | >AQZ41949.1 Flavi_E_C |
| 1864 | >AQZ41949.1 flavi_E_stem |
| 1865 | >AQZ41950.1 envelope protein E |
| 1866 | >AQZ41950.1 Flavi_E_C |
| 1867 | >AQZ41950.1 flavi_E_stem |
| 1868 | >AQZ41951.1 envelope protein E |
| 1869 | >AQZ41951.1 Flavi_E_C |
| 1870 | >AQZ41951.1 flavi_E_stem |
| 1871 | >AQZ41952.1 envelope protein E |
| 1872 | >AQZ41952.1 Flavi_glycoprot |
| 1873 | >AQZ41952.1 Flavi_E_C |
| 1874 | >AQZ41952.1 flavi_E_stem |
| 1875 | >AQZ41953.1 envelope protein E |
| 1876 | >AQZ41953.1 Flavi_glycoprot |
| 1877 | >AQZ41953.1 Flavi_E_C |
| 1878 | >AQZ41953.1 flavi_E_stem |
| 1879 | >AQZ41954.1 envelope protein E |
| 1880 | >AQZ41954.1 Flavi_E_C |
| 1881 | >AQZ41954.1 flavi_E_stem |
| 1882 | >AQZ41955.1 envelope protein E |
| 1883 | >AQZ41955.1 Flavi_glycoprot |
| 1884 | >AQZ41955.1 Flavi_E_C |
| 1885 | >AQZ41955.1 flavi_E_stem |
| 1886 | >AQZ41956.1 envelope protein E |
| 1887 | >AQZ41956.1 Flavi_E_C |
| 1888 | >AQZ41956.1 flavi_E_stem |
| 1889 | >AQW43707.1 Flavi_glycoprot |
| 1890 | >AQW43707.1 Flavi_E_C |
| 1891 | >AQW43707.1 flavi_E_stem |
| 1892 | >AQW43708.1 Flavi_glycoprot |
| 1893 | >AQW43708.1 Flavi_E_C |
| 1894 | >AQW43708.1 flavi_E_stem |
| 1895 | >BAX00477.1 Flavi_glycoprot |
| 1896 | >BAX00477.1 Flavi_E_C |
| 1897 | >BAX00477.1 flavi_E_stem |
| 1898 | >AQV07165.1 envelope protein E |
| 1899 | >AQV07165.1 Flavi_glycoprot |
| 1900 | >AQV07165.1 Flavi_E_C |
| 1901 | >AQV07165.1 flavi_E_stem |
| 1902 | >AOO19564.1 Flavi_glycoprot |
| 1903 | >AOO19564.1 Flavi_E_C |
| 1904 | >AOO19564.1 flavi_E_stem |
| 1905 | >APO36913.1 Flavi_glycoprot |
| 1906 | >APO36913.1 Flavi_E_C |
| 1907 | >APO36913.1 flavi_E_stem |
| 1908 | >AMM43325.1 Flavi_glycoprot |
| 1909 | >AMM43325.1 Flavi_E_C |
| 1910 | >AMM43325.1 flavi_E_stem |
| 1911 | >AMM43326.1 Flavi_glycoprot |
| 1912 | >AMM43326.1 Flavi_E_C |
| 1913 | >AMM43326.1 flavi_E_stem |
| 1914 | >APH11492.1 envelope protein E |
| 1915 | >APH11492.1 Flavi_glycoprot |
| 1916 | >APH11492.1 Flavi_E_C |
| 1917 | >APH11492.1 flavi_E_stem |
| 1918 | >APO08503.1 Flavi_E_C |
| 1919 | >APO08503.1 flavi_E_stem |
| 1920 | >APC60216.2 Flavi_glycoprot |
| 1921 | >APC60216.2 Flavi_E_C |
| 1922 | >APC60216.2 flavi_E_stem |
| 1923 | >ANH22038.1 Flavi_E_C |
| 1924 | >ANH22038.1 flavi_E_stem |
| 1925 | >BAV82373.1 Flavi_E_C |
| 1926 | >BAV82373.1 flavi_E_stem |
| 1927 | >AOR82892.1 Flavi_E_C |
| 1928 | >AOR82892.1 flavi_E_stem |
| 1929 | >AOR82893.1 Flavi_E_C |
| 1930 | >AOR82893.1 flavi_E_stem |
| 1931 | >AOR51315.1 Flavi_glycoprot |
| 1932 | >AOR51315.1 Flavi_E_C |
| 1933 | >AOR51315.1 flavi_E_stem |
| 1934 | >AND01116.2 Flavi_glycoprot |
| 1935 | >AND01116.2 Flavi_E_C |
| 1936 | >AND01116.2 flavi_E_stem |
| 1937 | >AOG18296.1 Flavi_glycoprot |
| 1938 | >AOG18296.1 Flavi_E_C |
| 1939 | >AOG18296.1 flavi_E_stem |
| 1940 | >AOC50652.1 envelope protein E |
| 1941 | >AOC50653.1 envelope protein E |
| 1942 | >AOC50654.1 envelope protein E |
| 1943 | >ANZ46736.1 Flavi_E_C |
| 1944 | >ANZ46736.1 flavi_E_stem |
| 1945 | >ANW07474.2 envelope protein E |
| 1946 | >ANW07474.2 Flavi_E_C |
| 1947 | >ANW07474.2 flavi_E_stem |
| 1948 | >ANW07475.1 envelope protein E |
| 1949 | >ANW07476.1 envelope protein E |
| 1950 | >ANW07476.1 Flavi_E_C |
| 1951 | >ANW07476.1 flavi_E_stem |
| 1952 | >ANW07477.1 envelope protein E |
| 1953 | >ANW07477.1 Flavi_E_C |
| 1954 | >ANW07477.1 flavi_E_stem |
| 1955 | >ANN44857.1 Flavi_glycoprot |
| 1956 | >ANN44857.1 Flavi_E_C |
| 1957 | >ANN44857.1 flavi_E_stem |
| 1958 | >ANN83272.1 envelope protein E |
| 1959 | >ANN83273.1 envelope protein E |
| 1960 | >ANK57897.1 Flavi_glycoprot |
| 1961 | >ANK57897.1 Flavi_E_C |
| 1962 | >ANK57897.1 flavi_E_stem |
| 1963 | >ANH10698.1 Flavi_E_C |
| 1964 | >ANH10698.1 flavi_E_stem |
| 1965 | >ANG09399.1 Flavi_E_C |
| 1966 | >ANG09399.1 flavi_E_stem |
| 1967 | >ANF16414.1 Flavi_glycoprot |
| 1968 | >ANF16414.1 Flavi_E_C |
| 1969 | >ANF16414.1 flavi_E_stem |
| 1970 | >ANC90427.1 envelope protein E |
| 1971 | >ANC90428.1 envelope protein E |
| 1972 | >ANC90428.1 Flavi_glycoprot |
| 1973 | >ANC90428.1 Flavi_E_C |
| 1974 | >ANC90428.1 flavi_E_stem |
| 1975 | >ANB66182.1 envelope protein E |
| 1976 | >ANB66182.1 Flavi_glycoprot |
| 1977 | >ANB66182.1 Flavi_E_C |
| 1978 | >ANB66182.1 flavi_E_stem |
| 1979 | >ANB66183.1 envelope protein E |
| 1980 | >ANB66183.1 Flavi_E_C |
| 1981 | >ANB66183.1 flavi_E_stem |
| 1982 | >ANB66184.1 envelope protein E |
| 1983 | >ANA12599.1 Flavi_glycoprot |
| 1984 | >ANA12599.1 Flavi_E_C |
| 1985 | >ANA12599.1 flavi_E_stem |
| 1986 | >AMX81919.1 Flavi_E_C |
| 1987 | >AMX81919.1 flavi_E_stem |
| 1988 | >AMR39832.1 Flavi_E_C |
| 1989 | >AMR39832.1 flavi_E_stem |
| 1990 | >AMR39833.1 Flavi_E_C |
| 1991 | >AMR39833.1 flavi_E_stem |
| 1992 | >AMR39834.1 Flavi_E_C |
| 1993 | >AMR39834.1 flavi_E_stem |
| 1994 | >AMR39835.1 Flavi_E_C |
| 1995 | >AMR39835.1 flavi_E_stem |
| 1996 | >AMR39836.1 Flavi_E_C |
| 1997 | >AMR39836.1 flavi_E_stem |
| 1998 | >AMQ48986.1 Flavi_E_C |
| 1999 | >AMQ48986.1 flavi_E_stem |
| 2000 | >AMQ48981.1 envelope protein E |
| 2001 | >AMQ48981.1 Flavi_E_C |
| 2002 | >AMQ48981.1 flavi_E_stem |
| 2003 | >AMQ48982.1 envelope protein E |
| 2004 | >AMQ48982.1 Flavi_E_C |
| 2005 | >AMQ48982.1 flavi_E_stem |
| 2006 | >AMQ34003.1 Env |
| 2007 | >AMQ34003.1 Flavi_E_C |
| 2008 | >AMQ34003.1 flavi_E_stem |
| 2009 | >AMQ34004.1 Env |
| 2010 | >AMQ34004.1 Flavi_E_C |
| 2011 | >AMQ34004.1 flavi_E_stem |
| 2012 | >AMN14619.1 Flavi_E_C |
| 2013 | >AMN14619.1 flavi_E_stem |
| 2014 | >AMN14620.1 Flavi_E_C |
| 2015 | >AMN14620.1 flavi_E_stem |
| 2016 | >AMM39806.1 Flavi_glycoprot |
| 2017 | >AMM39806.1 Flavi_E_C |
| 2018 | >AMM39806.1 flavi_E_stem |
| 2019 | >AMK79469.1 Flavi_E_C |
| 2020 | >AMK79469.1 flavi_E_stem |
| 2021 | >AMD16557.1 Flavi_E_C |
| 2022 | >AMD16557.1 flavi_E_stem |
| 2023 | >AMH87239.1 Flavi_E_C |
| 2024 | >AMH87239.1 flavi_E_stem |
| 2025 | >AMB18850.1 Flavi_glycoprot |
| 2026 | >AMB18850.1 Flavi_E_C |
| 2027 | >AMB18850.1 flavi_E_stem |
| 2028 | >AMD61710.1 Flavi_glycoprot |
| 2029 | >AMD61710.1 Flavi_E_C |
| 2030 | >AMD61710.1 flavi_E_stem |
| 2031 | >AMD61711.1 Flavi_E_C |
| 2032 | >AMD61711.1 flavi_E_stem |
| 2033 | >AMB37295.1 Flavi_E_C |
| 2034 | >AMB37295.1 flavi_E_stem |
| 2035 | >AMC13911.1 Flavi_E_C |
| 2036 | >AMC13911.1 flavi_E_stem |
| 2037 | >ALU33341.1 Flavi_glycoprot |
| 2038 | >ALU33341.1 Flavi_E_C |
| 2039 | >ALU33341.1 flavi_E_stem |
| 2040 | >BAP47441.1 Flavi_E_C |
| 2041 | >BAP47441.1 flavi_E_stem |
| 2042 | >AHZ13508.1 Flavi_E_C |
| 2043 | >AHZ13508.1 flavi_E_stem |
| 2044 | >AAV34151.1 Flavi_E_C |
| 2045 | >AAV34151.1 flavi_E_stem |

TABLE 1F
Non-limiting example Zika Protein M sequences

| SEQ | Zika viruses with example |
|---|---|
| ID NO | Protein M sequences |
| 2046 | YP_009430297.1 membrane glycoprotein |
| | precursor M |
| 2047 | YP_009430297.1 Flavivirus polyprotein |
| | propeptide |
| 2048 | YP_009430297.1 Flavivirus envelope |
| | glycoprotein M |
| 2049 | YP_009430299.1 membrane glycoprotein M |
| 2050 | YP_009428568.1 membrane glycoprotein |
| | precursor M |
| 2051 | YP_009428568.1 protein pr |
| 2052 | YP_009428568.1 Flavivirus polyprotein |
| | propeptide |
| 2053 | YP_009428568.1 membrane glycoprotein M |
| 2054 | YP_009428568.1 Flavivirus envelope |
| | glycoprotein M |
| 2055 | YP_009227197.1 membrane glycoprotein |
| | precursor M |
| 2056 | YP_009227197.1 Flavivirus polyprotein |
| | propeptide |
| 2057 | YP_009227197.1 Flavivirus envelope |
| | glycoprotein M |
| 2058 | YP_009227208.1 membrane glycoprotein M |
| 2059 | YP_009227208.1 Flavivirus envelope |
| | glycoprotein M |
| 2060 | YP_002790881.1 protein pr |
| 2061 | YP_002790881.1 Flavivirus polyprotein |
| | propeptide |
| 2062 | YP_002790881.1 membrane glycoprotein M |
| 2063 | UHI99865.1 membrane glycoprotein |
| | precursor M |
| 2064 | UHI99865.1 protein pr |
| 2065 | UHI99865.1 Flavivirus polyprotein |
| | propeptide |
| 2066 | UHI99865.1 membrane glycoprotein M |
| 2067 | UHI99866.1 membrane glycoprotein |
| | precursor M |
| 2068 | UHI99866.1 protein pr |
| 2069 | UHI99866.1 Flavivirus polyprotein |
| | propeptide |
| 2070 | UHI99866.1 membrane glycoprotein M |
| 2071 | UHI99867.1 membrane glycoprotein |
| | precursor M |
| 2072 | UHI99867.1 protein pr |
| 2073 | UHI99867.1 membrane glycoprotein M |
| 2074 | UED15620.1 membrane glycoprotein |
| | precursor M |
| 2075 | UED15620.1 protein pr |
| 2076 | UED15620.1 Flavivirus polyprotein |
| | propeptide |
| 2077 | UED15620.1 membrane glycoprotein M |
| 2078 | UBI73854.1 membrane glycoprotein |
| | precursor M |
| 2079 | UBI73854.1 protein pr |
| 2080 | UBI73854.1 Flavivirus polyprotein |
| | propeptide |
| 2081 | UBI73854.1 membrane glycoprotein M |
| 2082 | QKF93428.1 membrane glycoprotein |
| | precursor M |
| 2083 | QKF93428.1 protein pr |
| 2084 | QKF93428.1 Flavivirus polyprotein |
| | propeptide |
| 2085 | QKF93428.1 membrane glycoprotein M |
| 2086 | QKF93429.1 membrane glycoprotein |
| | precursor M |
| 2087 | QKF93429.1 protein pr |
| 2088 | QKF93429.1 Flavivirus polyprotein |
| | propeptide |
| 2089 | QKF93429.1 membrane glycoprotein M |
| 2090 | QKF93430.1 membrane glycoprotein |
| | precursor M |
| 2091 | QKF93430.1 protein pr |
| 2092 | QKF93430.1 Flavivirus polyprotein |
| | propeptide |
| 2093 | QKF93430.1 membrane glycoprotein M |
| 2094 | QKF93431.1 membrane glycoprotein |
| | precursor M |
| 2095 | QKF93431.1 protein pr |
| 2096 | QKF93431.1 Flavivirus polyprotein |
| | propeptide |
| 2097 | QKF93431.1 membrane glycoprotein M |
| 2098 | QKF93432.1 membrane glycoprotein |
| | precursor M |
| 2099 | QKF93432.1 protein pr |
| 2100 | QKF93432.1 Flavivirus polyprotein |
| | propeptide |
| 2101 | QKF93432.1 membrane glycoprotein M |
| 2102 | QKF93433.1 membrane glycoprotein |
| | precursor M |
| 2103 | QKF93433.1 protein pr |
| 2104 | QKF93433.1 Flavivirus polyprotein |
| | propeptide |
| 2105 | QKF93433.1 membrane glycoprotein M |
| 2106 | QKF93434.1 membrane glycoprotein |
| | precursor M |
| 2107 | QKF93434.1 protein pr |
| 2108 | QKF93434.1 Flavivirus polyprotein |
| | propeptide |
| 2109 | QKF93434.1 membrane glycoprotein M |
| 2110 | QKF93435.1 membrane glycoprotein |
| | precursor M |
| 2111 | QKF93435.1 protein pr |
| 2112 | QKF93435.1 Flavivirus polyprotein |
| | propeptide |
| 2113 | QKF93435.1 membrane glycoprotein M |
| 2114 | QKF93436.1 membrane glycoprotein |
| | precursor M |
| 2115 | QKF93436.1 protein pr |
| 2116 | QKF93436.1 Flavivirus polyprotein |
| | propeptide |
| 2117 | QKF93436.1 membrane glycoprotein M |
| 2118 | QKF93437.1 membrane glycoprotein |
| | precursor M |
| 2119 | QKF93437.1 protein pr |
| 2120 | QKF93437.1 Flavivirus polyprotein |
| | propeptide |
| 2121 | QKF93437.1 membrane glycoprotein M |
| 2122 | QKF93438.1 membrane glycoprotein |
| | precursor M |
| 2123 | QKF93438.1 protein pr |
| 2124 | QKF93438.1 Flavivirus polyprotein |
| | propeptide |
| 2125 | QKF93438.1 membrane glycoprotein M |
| 2126 | QKF93439.1 membrane glycoprotein |
| | precursor M |
| 2127 | QKF93439.1 protein pr |
| 2128 | QKF93439.1 Flavivirus polyprotein |
| | propeptide |
| 2129 | QKF93439.1 membrane glycoprotein M |
| 2130 | QKF93440.1 membrane glycoprotein |
| | precursor M |
| 2131 | QKF93440.1 protein pr |
| 2132 | QKF93440.1 Flavivirus polyprotein |
| | propeptide |
| 2133 | QKF93440.1 membrane glycoprotein M |
| 2134 | QKF93441.1 membrane glycoprotein |
| | precursor M |
| 2135 | QKF93441.1 protein pr |
| 2136 | QKF93441.1 Flavivirus polyprotein |
| | propeptide |
| 2137 | QKF93441.1 membrane glycoprotein M |
| 2138 | QVL61761.1 Flavivirus polyprotein |
| | propeptide |
| 2139 | QPC45464.1 Flavivirus polyprotein |
| | propeptide |
| 2140 | QTA38993.1 Flavivirus polyprotein |
| | propeptide |
| 2141 | QTA38994.1 Flavivirus polyprotein |
| | propeptide |
| 2142 | QOF88708.1 membrane glycoprotein |
| | precursor M |
| 2143 | QOF88708.1 protein pr |
| 2144 | QOF88708.1 Flavivirus polyprotein |
| | propeptide |
| 2145 | QOF88708.1 membrane glycoprotein M |
| 2146 | QLI34051.1 Flavivirus polyprotein |
| | propeptide |
| 2147 | QKX95861.1 Flavivirus polyprotein |
| | propeptide |
| 2148 | QKU35968.1 membrane glycoprotein |
| | precursor M |
| 2149 | QKU35968.1 protein pr |
| 2150 | QKU35968.1 Flavivirus polyprotein |
| | propeptide |
| 2151 | QKU35968.1 membrane glycoprotein M |
| 2152 | QKM77298.1 membrane glycoprotein |
| | precursor M |
| 2153 | QKM77298.1 protein pr |
| 2154 | QKM77298.1 Flavivirus polyprotein |
| | propeptide |
| 2155 | QKM77298.1 membrane glycoprotein M |
| 2156 | QKM77299.1 membrane glycoprotein |
| | precursor M |
| 2157 | QKM77299.1 protein pr |
| 2158 | QKM77299.1 Flavivirus polyprotein |
| | propeptide |
| 2159 | QKM77299.1 membrane glycoprotein M |
| 2160 | QKM77300.1 membrane glycoprotein |
| | precursor M |
| 2161 | QKM77300.1 protein pr |
| 2162 | QKM77300.1 Flavivirus polyprotein |
| | propeptide |
| 2163 | QKM77300.1 membrane glycoprotein M |
| 2164 | QKM77301.1 membrane glycoprotein |
| | precursor M |
| 2165 | QKM77301.1 protein pr |
| 2166 | QKM77301.1 Flavivirus polyprotein |
| | propeptide |
| 2167 | QKM77301.1 membrane glycoprotein M |
| 2168 | QBM11757.1 Flavivirus polyprotein |
| | propeptide |
| 2169 | AZS35403.1 Flavivirus polyprotein |
| | propeptide |
| 2170 | AZS35404.1 Flavivirus polyprotein |
| | propeptide |
| 2171 | AZS35405.1 Flavivirus polyprotein |
| | propeptide |
| 2172 | QGA72951.1 membrane glycoprotein |
| | precursor M |
| 2173 | QGA72951.1 protein pr |
| 2174 | QGA72951.1 Flavivirus polyprotein |
| | propeptide |
| 2175 | QGA72951.1 membrane glycoprotein M |
| 2176 | QGA67050.1 membrane glycoprotein |
| | precursor M |
| 2177 | QGA67050.1 protein pr |
| 2178 | QGA67050.1 Flavivirus polyprotein |
| | propeptide |
| 2179 | QGA67050.1 membrane glycoprotein M |
| 2180 | QGA67051.1 membrane glycoprotein |
| | precursor M |
| 2181 | QGA67051.1 protein pr |
| 2182 | QGA67051.1 Flavivirus polyprotein |
| | propeptide |
| 2183 | QGA67051.1 membrane glycoprotein M |
| 2184 | QGA67052.1 membrane glycoprotein |
| | precursor M |
| 2185 | QGA67052.1 protein pr |
| 2186 | QGA67052.1 Flavivirus polyprotein |
| | propeptide |
| 2187 | QGA67052.1 membrane glycoprotein M |
| 2188 | QGA67053.1 membrane glycoprotein |
| | precursor M |
| 2189 | QGA67053.1 protein pr |
| 2190 | QGA67053.1 Flavivirus polyprotein |
| | propeptide |
| 2191 | QGA67053.1 membrane glycoprotein M |
| 2192 | QGA67054.1 membrane glycoprotein |
| | precursor M |
| 2193 | QGA67054.1 protein pr |
| 2194 | QGA67054.1 Flavivirus polyprotein |
| | propeptide |
| 2195 | QGA67054.1 membrane glycoprotein M |
| 2196 | QGA67055.1 membrane glycoprotein |
| | precursor M |
| 2197 | QGA67055.1 protein pr |
| 2198 | QGA67055.1 Flavivirus polyprotein |
| | propeptide |
| 2199 | QGA67055.1 membrane glycoprotein M |
| 2200 | QGA67056.1 membrane glycoprotein |
| | precursor M |
| 2201 | QGA67056.1 protein pr |
| 2202 | QGA67056.1 Flavivirus polyprotein |
| | propeptide |
| 2203 | QGA67056.1 membrane glycoprotein M |
| 2204 | QFZ95661.1 membrane glycoprotein |
| | precursor M |
| 2205 | QFZ95661.1 protein pr |
| 2206 | QFZ95661.1 Flavivirus polyprotein |
| | propeptide |
| 2207 | QFZ95661.1 membrane glycoprotein M |
| 2208 | QDZ58854.1 Flavivirus polyprotein |
| | propeptide |
| 2209 | QDZ58855.1 Flavivirus polyprotein |
| | propeptide |
| 2210 | QDZ58856.1 Flavivirus polyprotein |
| | propeptide |
| 2211 | AXQ39996.1 membrane glycoprotein |
| | precursor M |
| 2212 | AXQ39996.1 protein pr |
| 2213 | AXQ39996.1 Flavivirus polyprotein |
| | propeptide |
| 2214 | AXQ39996.1 membrane glycoprotein M |
| 2215 | AXQ39997.1 membrane glycoprotein |
| | precursor M |
| 2216 | AXQ39997.1 protein pr |
| 2217 | AXQ39997.1 Flavivirus polyprotein |
| | propeptide |
| 2218 | AXQ39997.1 membrane glycoprotein M |
| 2219 | AXQ39998.1 membrane glycoprotein |
| | precursor M |
| 2220 | AXQ39998.1 protein pr |
| 2221 | AXQ39998.1 Flavivirus polyprotein |
| | propeptide |
| 2222 | AXQ39998.1 membrane glycoprotein M |
| 2223 | AXQ39999.1 membrane glycoprotein |
| | precursor M |
| 2224 | AXQ39999.1 protein pr |
| 2225 | AXQ39999.1 Flavivirus polyprotein |
| | propeptide |
| 2226 | AXQ39999.1 membrane glycoprotein M |
| 2227 | AXQ40000.1 membrane glycoprotein |
| | precursor M |
| 2228 | AXQ40000.1 protein pr |
| 2229 | AXQ40000.1 Flavivirus polyprotein |
| | propeptide |
| 2230 | AXQ40000.1 membrane glycoprotein M |
| 2231 | AXQ40001.1 membrane glycoprotein |
| | precursor M |
| 2232 | AXQ40001.1 protein pr |
| 2233 | AXQ40001.1 Flavivirus polyprotein |
| | propeptide |
| 2234 | AXQ40001.1 membrane glycoprotein M |
| 2235 | AXQ40002.1 membrane glycoprotein |
| | precursor M |
| 2236 | AXQ40002.1 protein pr |
| 2237 | AXQ40002.1 Flavivirus polyprotein |
| | propeptide |
| 2238 | AXQ40002.1 membrane glycoprotein M |
| 2239 | AXQ40003.1 membrane glycoprotein |
| | precursor M |
| 2240 | AXQ40003.1 protein pr |
| 2241 | AXQ40003.1 Flavivirus polyprotein |
| | propeptide |
| 2242 | AXQ40003.1 membrane glycoprotein M |
| 2243 | AXQ40004.1 membrane glycoprotein |
| | precursor M |
| 2244 | AXQ40004.1 protein pr |
| 2245 | AXQ40004.1 Flavivirus polyprotein |
| | propeptide |
| 2246 | AXQ40004.1 membrane glycoprotein M |
| 2247 | AXQ40005.1 membrane glycoprotein |
| | precursor M |
| 2248 | AXQ40005.1 protein pr |
| 2249 | AXQ40005.1 Flavivirus polyprotein |
| | propeptide |
| 2250 | AXQ40005.1 membrane glycoprotein M |
| 2251 | AXQ40006.1 membrane glycoprotein |
| | precursor M |
| 2252 | AXQ40006.1 protein pr |
| 2253 | AXQ40006.1 Flavivirus polyprotein |
| | propeptide |
| 2254 | AXQ40006.1 membrane glycoprotein M |
| 2255 | AXQ40007.1 membrane glycoprotein |
| | precursor M |
| 2256 | AXQ40007.1 protein pr |
| 2257 | AXQ40007.1 Flavivirus polyprotein |
| | propeptide |
| 2258 | AXQ40007.1 membrane glycoprotein M |
| 2259 | QDH45910.1 Flavivirus polyprotein |
| | propeptide |
| 2260 | QCG74166.1 Flavivirus polyprotein |
| | propeptide |
| 2261 | AYV74916.1 Flavivirus polyprotein |
| | propeptide |
| 2262 | AYV74916.1 Flavivirus envelope |
| | glycoprotein M |
| 2263 | AYV74917.1 Flavivirus polyprotein |
| | propeptide |
| 2264 | AYV74917.1 Flavivirus envelope |
| | glycoprotein M |
| 2265 | AYV74918.1 Flavivirus polyprotein |
| | propeptide |
| 2266 | AYV74918.1 Flavivirus envelope |
| | glycoprotein M |
| 2267 | AYV74919.1 Flavivirus polyprotein |
| | propeptide |
| 2268 | AYV74919.1 Flavivirus envelope |
| | glycoprotein M |
| 2269 | AYV74920.1 Flavivirus polyprotein |
| | propeptide |
| 2270 | AYV74920.1 Flavivirus envelope |
| | glycoprotein M |
| 2271 | AYV74921.1 Flavivirus polyprotein |
| | propeptide |
| 2272 | AYV74921.1 Flavivirus envelope |
| | glycoprotein M |
| 2273 | AYV74922.1 Flavivirus polyprotein |
| | propeptide |
| 2274 | AYV74922.1 Flavivirus envelope |
| | glycoprotein M |
| 2275 | AYV74923.1 Flavivirus polyprotein |
| | propeptide |
| 2276 | AYV74923.1 Flavivirus envelope |
| | glycoprotein M |
| 2277 | AYV74924.1 Flavivirus polyprotein |
| | propeptide |
| 2278 | AYV74924.1 Flavivirus envelope |
| | glycoprotein M |
| 2279 | AYV74925.1 Flavivirus polyprotein |
| | propeptide |
| 2280 | AYV74925.1 Flavivirus envelope |
| | glycoprotein M |
| 2281 | AYV74927.1 Flavivirus polyprotein |
| | propeptide |
| 2282 | AYV74927.1 Flavivirus envelope |
| | glycoprotein M |
| 2283 | AYV74928.1 Flavivirus polyprotein |
| | propeptide |
| 2284 | AYV74928.1 Flavivirus envelope |
| | glycoprotein M |
| 2285 | AYV74929.1 Flavivirus polyprotein |
| | propeptide |
| 2286 | AYV74929.1 Flavivirus envelope |
| | glycoprotein M |
| 2287 | AYV74930.1 Flavivirus polyprotein |
| | propeptide |
| 2288 | AYV74930.1 Flavivirus envelope |
| | glycoprotein M |
| 2289 | AYV74931.1 Flavivirus polyprotein |
| | propeptide |
| 2290 | AYV74931.1 Flavivirus envelope |
| | glycoprotein M |
| 2291 | AYV74932.1 Flavivirus polyprotein |
| | propeptide |
| 2292 | AYV74932.1 Flavivirus envelope |
| | glycoprotein M |
| 2293 | AYV74933.1 Flavivirus polyprotein |
| | propeptide |
| 2294 | AYV74933.1 Flavivirus envelope |
| | glycoprotein M |
| 2295 | AYV74934.1 Flavivirus polyprotein |
| | propeptide |
| 2296 | AYV74934.1 Flavivirus envelope |
| | glycoprotein M |
| 2297 | AYV74935.1 Flavivirus polyprotein |
| | propeptide |
| 2298 | AYV74935.1 Flavivirus envelope |
| | glycoprotein M |
| 2299 | AYV74936.1 Flavivirus polyprotein |
| | propeptide |
| 2300 | AYV74936.1 Flavivirus envelope |
| | glycoprotein M |
| 2301 | AYV74937.1 Flavivirus polyprotein |
| | propeptide |
| 2302 | AYV74937.1 Flavivirus envelope |
| | glycoprotein M |
| 2303 | AYU74865.1 Flavivirus polyprotein |
| | propeptide |
| 2304 | AYU74865.1 Flavivirus envelope |
| | glycoprotein M |
| 2305 | ATB53753.1 Flavivirus polyprotein |
| | propeptide |
| 2306 | ATB53754.1 Flavivirus polyprotein |
| | propeptide |
| 2307 | ATB53754.1 Flavivirus envelope |
| | glycoprotein M |
| 2308 | AVC63697.1 Flavivirus polyprotein |
| | propeptide |
| 2309 | AVC63697.1 Flavivirus envelope |
| | glycoprotein M |
| 2310 | AVC63698.1 Flavivirus polyprotein |
| | propeptide |
| 2311 | AVC63698.1 Flavivirus envelope |
| | glycoprotein M |
| 2312 | AYI50273.1 protein pr |
| 2313 | AYI50273.1 Flavivirus polyprotein |
| | propeptide |
| 2314 | AYI50273.1 small envelope protein M |
| 2315 | AYI50273.1 Flavivirus envelope |
| | glycoprotein M |
| 2316 | AYI50274.1 protein pr |
| 2317 | AYI50274.1 Flavivirus polyprotein |
| | propeptide |
| 2318 | AYI50274.1 small envelope protein M |
| 2319 | AYI50274.1 Flavivirus envelope |
| | glycoprotein M |
| 2320 | AYI50275.1 protein pr |
| 2321 | AYI50275.1 Flavivirus polyprotein |
| | propeptide |
| 2322 | AYI50275.1 small envelope protein M |
| 2323 | AYI50275.1 Flavivirus envelope |
| | glycoprotein M |
| 2324 | ASR91936.1 Flavivirus polyprotein |
| | propeptide |
| 2325 | ASR91936.1 Flavivirus envelope |
| | glycoprotein M |
| 2326 | AXF50014.1 Flavivirus polyprotein |
| | propeptide |
| 2327 | AXF50014.1 Flavivirus envelope |
| | glycoprotein M |
| 2328 | AXF50015.1 Flavivirus polyprotein |
| | propeptide |
| 2329 | AXF50016.1 Flavivirus polyprotein |
| | propeptide |
| 2330 | AXF50016.1 Flavivirus envelope |
| | glycoprotein M |
| 2331 | AXF50052.1 Flavivirus polyprotein |
| | propeptide |
| 2332 | AXF50052.1 Flavivirus envelope |
| | glycoprotein M |
| 2333 | ATL14618.1 Flavivirus polyprotein |
| | propeptide |
| 2334 | AUF35021.1 Flavivirus polyprotein |
| | propeptide |
| 2335 | AUF35021.1 Flavivirus envelope |
| | glycoprotein M |
| 2336 | AUF35022.1 Flavivirus polyprotein |
| | propeptide |
| 2337 | AUF35022.1 Flavivirus envelope |
| | glycoprotein M |
| 2338 | AVG19202.1 Flavivirus polyprotein |
| | propeptide |
| 2339 | AVG19202.1 Flavivirus envelope |
| | glycoprotein M |
| 2340 | AVG19203.1 Flavivirus polyprotein |
| | propeptide |
| 2341 | AVG19203.1 Flavivirus envelope |
| | glycoprotein M |
| 2342 | AVV62004.1 Flavivirus polyprotein |
| | propeptide |
| 2343 | AVV62004.1 Flavivirus envelope |
| | glycoprotein M |
| 2344 | ARU07074.1 Flavivirus polyprotein |
| | propeptide |
| 2345 | ARU07074.1 Flavivirus envelope |
| | glycoprotein M |
| 2346 | ARU07075.1 Flavivirus polyprotein |
| | propeptide |
| 2347 | ARU07075.1 Flavivirus envelope |
| | glycoprotein M |
| 2348 | ARU07076.1 Flavivirus polyprotein |
| | propeptide |
| 2349 | ARU07076.1 Flavivirus envelope |
| | glycoprotein M |
| 2350 | AUY62552.1 Flavivirus polyprotein |
| | propeptide |
| 2351 | AUY62553.1 Flavivirus polyprotein |
| | propeptide |
| 2352 | AUY62553.1 Flavivirus envelope |
| | glycoprotein M |
| 2353 | AWH65848.1 Flavivirus polyprotein |
| | propeptide |
| 2354 | AWH65849.1 Flavivirus polyprotein |
| | propeptide |
| 2355 | AWH65849.1 Flavivirus envelope |
| | glycoprotein M |
| 2356 | AWF93617.1 protein pr |
| 2357 | AWF93617.1 Flavivirus polyprotein |
| | propeptide |
| 2358 | AWF93617.1 small envelope protein M |
| 2359 | AWF93617.1 Flavivirus envelope |
| | glycoprotein M |
| 2360 | AWF93618.1 protein pr |
| 2361 | AWF93618.1 Flavivirus polyprotein |
| | propeptide |
| 2362 | AWF93618.1 small envelope protein M |
| 2363 | AWF93618.1 Flavivirus envelope |
| | glycoprotein M |
| 2364 | AWF93619.1 protein pr |
| 2365 | AWF93619.1 Flavivirus polyprotein |
| | propeptide |
| 2366 | AWF93619.1 small envelope protein M |
| 2367 | AWF93619.1 Flavivirus envelope |
| | glycoprotein M |
| 2368 | AWF93620.1 protein pr |
| 2369 | AWF93620.1 Flavivirus polyprotein |
| | propeptide |
| 2370 | AWF93620.1 small envelope protein M |
| 2371 | AWF93620.1 Flavivirus envelope |
| | glycoprotein M |
| 2372 | AWF93621.1 protein pr |
| 2373 | AWF93621.1 Flavivirus polyprotein |
| | propeptide |
| 2374 | AWF93621.1 small envelope protein M |
| 2375 | AWF93621.1 Flavivirus envelope |
| | glycoprotein M |
| 2376 | AWF93622.1 protein pr |
| 2377 | AWF93622.1 Flavivirus polyprotein |
| | propeptide |
| 2378 | AWF93622.1 small envelope protein M |
| 2379 | AWF93622.1 Flavivirus envelope |
| | glycoprotein M |
| 2380 | AWF93623.1 protein pr |
| 2381 | AWF93623.1 Flavivirus polyprotein |
| | propeptide |
| 2382 | AWF93623.1 small envelope protein M |
| 2383 | AWF93623.1 Flavivirus envelope |
| | glycoprotein M |
| 2384 | AWF93624.1 protein pr |
| 2385 | AWF93624.1 Flavivirus polyprotein |
| | propeptide |
| 2386 | AWF93624.1 small envelope protein M |
| 2387 | AWF93624.1 Flavivirus envelope |
| | glycoprotein M |
| 2388 | AWF93625.1 protein pr |
| 2389 | AWF93625.1 Flavivirus polyprotein |
| | propeptide |
| 2390 | AWF93625.1 small envelope protein M |
| 2391 | AWF93625.1 Flavivirus envelope |
| | glycoprotein M |
| 2392 | AWF93626.1 protein pr |
| 2393 | AWF93626.1 Flavivirus polyprotein |
| | propeptide |
| 2394 | AWF93626.1 small envelope protein M |
| 2395 | AWF93626.1 Flavivirus envelope |
| | glycoprotein M |
| 2396 | AWF93627.1 protein pr |
| 2397 | AWF93627.1 Flavivirus polyprotein |
| | propeptide |
| 2398 | AWF93627.1 small envelope protein M |
| 2399 | AWF93627.1 Flavivirus envelope |
| | glycoprotein M |
| 2400 | AWF93628.1 protein pr |
| 2401 | AWF93628.1 Flavivirus polyprotein |
| | propeptide |
| 2402 | AWF93628.1 small envelope protein M |
| 2403 | AWF93628.1 Flavivirus envelope |
| | glycoprotein M |
| 2404 | AWF93629.1 protein pr |
| 2405 | AWF93629.1 Flavivirus polyprotein |
| | propeptide |
| 2406 | AWF93629.1 small envelope protein M |
| 2407 | AWF93629.1 Flavivirus envelope |
| | glycoprotein M |
| 2408 | AWF93630.1 protein pr |
| 2409 | AWF93630.1 Flavivirus polyprotein |
| | propeptide |
| 2410 | AWF93630.1 small envelope protein M |
| 2411 | AWF93630.1 Flavivirus envelope |
| | glycoprotein M |
| 2412 | AWF93631.1 protein pr |
| 2413 | AWF93631.1 Flavivirus polyprotein |
| | propeptide |
| 2414 | AWF93631.1 small envelope protein M |
| 2415 | AWF93631.1 Flavivirus envelope |
| | glycoprotein M |
| 2416 | AWF93632.1 protein pr |
| 2417 | AWF93632.1 Flavivirus polyprotein |
| | propeptide |
| 2418 | AWF93632.1 small envelope protein M |
| 2419 | AWF93632.1 Flavivirus envelope |
| | glycoprotein M |
| 2420 | AWF93633.1 protein pr |
| 2421 | AWF93633.1 Flavivirus polyprotein |
| | propeptide |
| 2422 | AWF93633.1 small envelope protein M |
| 2423 | AWF93633.1 Flavivirus envelope |
| | glycoprotein M |
| 2424 | AWF93634.1 protein pr |
| 2425 | AWF93634.1 Flavivirus polyprotein |
| | propeptide |
| 2426 | AWF93634.1 small envelope protein M |
| 2427 | AWF93634.1 Flavivirus envelope |
| | glycoprotein M |
| 2428 | AWF93635.1 protein pr |
| 2429 | AWF93635.1 Flavivirus polyprotein |
| | propeptide |
| 2430 | AWF93635.1 small envelope protein M |
| 2431 | AWF93635.1 Flavivirus envelope |
| | glycoprotein M |
| 2432 | AVZ47169.1 Flavivirus polyprotein |
| | propeptide |
| 2433 | AVZ47169.1 Flavivirus envelope |
| | glycoprotein M |
| 2434 | AVW85800.1 protein pr |
| 2435 | AVW85800.1 Flavivirus polyprotein |
| | propeptide |
| 2436 | AVW85800.1 small envelope protein M |
| 2437 | AVW85800.1 Flavivirus envelope |
| | glycoprotein M |
| 2438 | AVW85801.1 protein pr |
| 2439 | AVW85801.1 Flavivirus polyprotein |
| | propeptide |
| 2440 | AVW85801.1 small envelope protein M |
| 2441 | AVW85801.1 Flavivirus envelope |
| | glycoprotein M |
| 2442 | AVW85802.1 protein pr |
| 2443 | AVW85802.1 Flavivirus polyprotein |
| | propeptide |
| 2444 | AVW85802.1 small envelope protein M |
| 2445 | AVW85802.1 Flavivirus envelope |
| | glycoprotein M |
| 2446 | AVW85803.1 protein pr |
| 2447 | AVW85803.1 Flavivirus polyprotein |
| | propeptide |
| 2448 | AVW85803.1 small envelope protein M |
| 2449 | AVW85803.1 Flavivirus envelope |
| | glycoprotein M |
| 2450 | AVW85804.1 protein pr |
| 2451 | AVW85804.1 Flavivirus polyprotein |
| | propeptide |
| 2452 | AVW85804.1 small envelope protein M |
| 2453 | AVW85804.1 Flavivirus envelope |
| | glycoprotein M |
| 2454 | AVW85805.1 protein pr |
| 2455 | AVW85805.1 Flavivirus polyprotein |
| | propeptide |
| 2456 | AVW85805.1 small envelope protein M |
| 2457 | AVW85805.1 Flavivirus envelope |
| | glycoprotein M |
| 2458 | AVW85806.1 protein pr |
| 2459 | AVW85806.1 Flavivirus polyprotein |
| | propeptide |
| 2460 | AVW85806.1 small envelope protein M |
| 2461 | AVW85806.1 Flavivirus envelope |
| | glycoprotein M |
| 2462 | AVW85807.1 protein pr |
| 2463 | AVW85807.1 Flavivirus polyprotein |
| | propeptide |
| 2464 | AVW85807.1 small envelope protein M |
| 2465 | AVW85807.1 Flavivirus envelope |
| | glycoprotein M |
| 2466 | AVW85808.1 protein pr |
| 2467 | AVW85808.1 Flavivirus polyprotein |
| | propeptide |
| 2468 | AVW85808.1 small envelope protein M |
| 2469 | AVW85808.1 Flavivirus envelope |
| | glycoprotein M |
| 2470 | AVW85809.1 protein pr |
| 2471 | AVW85809.1 Flavivirus polyprotein |
| | propeptide |
| 2472 | AVW85809.1 small envelope protein M |
| 2473 | AVW85809.1 Flavivirus envelope |
| | glycoprotein M |
| 2474 | AVW85810.1 protein pr |
| 2475 | AVW85810.1 Flavivirus polyprotein |
| | propeptide |
| 2476 | AVW85810.1 small envelope protein M |
| 2477 | AVW85810.1 Flavivirus envelope |
| | glycoprotein M |
| 2478 | AVW85811.1 protein pr |
| 2479 | AVW85811.1 Flavivirus polyprotein |
| | propeptide |
| 2480 | AVW85811.1 small envelope protein M |
| 2481 | AVW85811.1 Flavivirus envelope |
| | glycoprotein M |
| 2482 | AVW85812.1 protein pr |
| 2483 | AVW85812.1 Flavivirus polyprotein |
| | propeptide |
| 2484 | AVW85812.1 small envelope protein M |
| 2485 | AVW85812.1 Flavivirus envelope |
| | glycoprotein M |
| 2486 | AVW85813.1 protein pr |
| 2487 | AVW85813.1 Flavivirus polyprotein |
| | propeptide |
| 2488 | AVW85813.1 small envelope protein M |
| 2489 | AVW85813.1 Flavivirus envelope |
| | glycoprotein M |
| 2490 | AVW85814.1 protein pr |
| 2491 | AVW85814.1 Flavivirus polyprotein |
| | propeptide |
| 2492 | AVW85814.1 small envelope protein M |
| 2493 | AVW85814.1 Flavivirus envelope |
| | glycoprotein M |
| 2494 | AVW85815.1 protein pr |
| 2495 | AVW85815.1 Flavivirus polyprotein |
| | propeptide |
| 2496 | AVW85815.1 small envelope protein M |
| 2497 | AVW85815.1 Flavivirus envelope |
| | glycoprotein M |
| 2498 | AVW85816.1 protein pr |
| 2499 | AVW85816.1 Flavivirus polyprotein |
| | propeptide |
| 2500 | AVW85816.1 small envelope protein M |
| 2501 | AVW85816.1 Flavivirus envelope |
| | glycoprotein M |
| 2502 | AVW85817.1 protein pr |
| 2503 | AVW85817.1 Flavivirus polyprotein |
| | propeptide |
| 2504 | AVW85817.1 small envelope protein M |
| 2505 | AVW85817.1 Flavivirus envelope |
| | glycoprotein M |
| 2506 | AVW85818.1 protein pr |
| 2507 | AVW85818.1 Flavivirus polyprotein |
| | propeptide |
| 2508 | AVW85818.1 small envelope protein M |
| 2509 | AVW85818.1 Flavivirus envelope |
| | glycoprotein M |
| 2510 | AVW85819.1 protein pr |
| 2511 | AVW85819.1 Flavivirus polyprotein |
| | propeptide |
| 2512 | AVW85819.1 small envelope protein M |
| 2513 | AVW85819.1 Flavivirus envelope |
| | glycoprotein M |
| 2514 | AVW85820.1 protein pr |
| 2515 | AVW85820.1 Flavivirus polyprotein |
| | propeptide |
| 2516 | AVW85820.1 small envelope protein M |
| 2517 | AVW85820.1 Flavivirus envelope |
| | glycoprotein M |
| 2518 | AVW85821.1 protein pr |
| 2519 | AVW85821.1 Flavivirus polyprotein |
| | propeptide |
| 2520 | AVW85821.1 small envelope protein M |
| 2521 | AVW85821.1 Flavivirus envelope |
| | glycoprotein M |
| 2522 | AVW85822.1 protein pr |
| 2523 | AVW85822.1 Flavivirus polyprotein |
| | propeptide |
| 2524 | AVW85822.1 small envelope protein M |
| 2525 | AVW85822.1 Flavivirus envelope |
| | glycoprotein M |
| 2526 | AVW85823.1 protein pr |
| 2527 | AVW85823.1 Flavivirus polyprotein |
| | propeptide |
| 2528 | AVW85823.1 small envelope protein M |
| 2529 | AVW85823.1 Flavivirus envelope |
| | glycoprotein M |
| 2530 | AVW85824.1 protein pr |
| 2531 | AVW85824.1 Flavivirus polyprotein |
| | propeptide |
| 2532 | AVW85824.1 small envelope protein M |
| 2533 | AVW85824.1 Flavivirus envelope |
| | glycoprotein M |
| 2534 | AVW85825.1 protein pr |
| 2535 | AVW85825.1 Flavivirus polyprotein |
| | propeptide |
| 2536 | AVW85825.1 small envelope protein M |
| 2537 | AVW85825.1 Flavivirus envelope |
| | glycoprotein M |
| 2538 | AVW85826.1 protein pr |
| 2539 | AVW85826.1 Flavivirus polyprotein |
| | propeptide |
| 2540 | AVW85826.1 small envelope protein M |
| 2541 | AVW85826.1 Flavivirus envelope |
| | glycoprotein M |
| 2542 | AVW85827.1 protein pr |
| 2543 | AVW85827.1 Flavivirus polyprotein |
| | propeptide |
| 2544 | AVW85827.1 small envelope protein M |
| 2545 | AVW85827.1 Flavivirus envelope |
| | glycoprotein M |
| 2546 | AVW85828.1 protein pr |
| 2547 | AVW85828.1 Flavivirus polyprotein |
| | propeptide |
| 2548 | AVW85828.1 small envelope protein M |
| 2549 | AVW85828.1 Flavivirus envelope |
| | glycoprotein M |
| 2550 | AVW85829.1 protein pr |
| 2551 | AVW85829.1 Flavivirus polyprotein |
| | propeptide |
| 2552 | AVW85829.1 small envelope protein M |
| 2553 | AVW85829.1 Flavivirus envelope |
| | glycoprotein M |
| 2554 | AVW85830.1 protein pr |
| 2555 | AVW85830.1 Flavivirus polyprotein |
| | propeptide |
| 2556 | AVW85830.1 small envelope protein M |
| 2557 | AVW85830.1 Flavivirus envelope |
| | glycoprotein M |
| 2558 | AVW85831.1 protein pr |
| 2559 | AVW85831.1 Flavivirus polyprotein |
| | propeptide |
| 2560 | AVW85831.1 small envelope protein M |
| 2561 | AVW85831.1 Flavivirus envelope |
| | glycoprotein M |
| 2562 | AVW85832.1 protein pr |
| 2563 | AVW85832.1 Flavivirus polyprotein |
| | propeptide |
| 2564 | AVW85832.1 small envelope protein M |
| 2565 | AVW85832.1 Flavivirus envelope |
| | glycoprotein M |
| 2566 | AVW85833.1 protein pr |
| 2567 | AVW85833.1 Flavivirus polyprotein |
| | propeptide |
| 2568 | AVW85833.1 small envelope protein M |
| 2569 | AVW85833.1 Flavivirus envelope |
| | glycoprotein M |
| 2570 | AVW85834.1 protein pr |
| 2571 | AVW85834.1 Flavivirus polyprotein |
| | propeptide |
| 2572 | AVW85834.1 small envelope protein M |
| 2573 | AVW85834.1 Flavivirus envelope |
| | glycoprotein M |
| 2574 | AVW85835.1 protein pr |
| 2575 | AVW85835.1 Flavivirus polyprotein |
| | propeptide |
| 2576 | AVW85835.1 small envelope protein M |
| 2577 | AVW85835.1 Flavivirus envelope |
| | glycoprotein M |
| 2578 | AVW85836.1 protein pr |
| 2579 | AVW85836.1 Flavivirus polyprotein |
| | propeptide |
| 2580 | AVW85836.1 small envelope protein M |
| 2581 | AVW85836.1 Flavivirus envelope |
| | glycoprotein M |
| 2582 | AVW85837.1 protein pr |
| 2583 | AVW85837.1 Flavivirus polyprotein |
| | propeptide |
| 2584 | AVW85837.1 small envelope protein M |
| 2585 | AVW85837.1 Flavivirus envelope |
| | glycoprotein M |
| 2586 | AVW85838.1 protein pr |
| 2587 | AVW85838.1 Flavivirus polyprotein |
| | propeptide |
| 2588 | AVW85838.1 small envelope protein M |
| 2589 | AVW85838.1 Flavivirus envelope |
| | glycoprotein M |
| 2590 | AVW85839.1 protein pr |
| 2591 | AVW85839.1 Flavivirus polyprotein |
| | propeptide |
| 2592 | AVW85839.1 small envelope protein M |
| 2593 | AVW85839.1 Flavivirus envelope |
| | glycoprotein M |
| 2594 | AVW85840.1 protein pr |
| 2595 | AVW85840.1 Flavivirus polyprotein |
| | propeptide |
| 2596 | AVW85840.1 small envelope protein M |
| 2597 | AVW85840.1 Flavivirus envelope |
| | glycoprotein M |
| 2598 | AVW85841.1 protein pr |
| 2599 | AVW85841.1 Flavivirus polyprotein |
| | propeptide |
| 2600 | AVW85841.1 small envelope protein M |
| 2601 | AVW85841.1 Flavivirus envelope |
| | glycoprotein M |
| 2602 | AVW85842.1 protein pr |
| 2603 | AVW85842.1 Flavivirus polyprotein |
| | propeptide |
| 2604 | AVW85842.1 small envelope protein M |
| 2605 | AVW85842.1 Flavivirus envelope |
| | glycoprotein M |
| 2606 | AVW85843.1 protein pr |
| 2607 | AVW85843.1 Flavivirus polyprotein |
| | propeptide |
| 2608 | AVW85843.1 small envelope protein M |
| 2609 | AVW85843.1 Flavivirus envelope |
| | glycoprotein M |
| 2610 | AVW85844.1 protein pr |
| 2611 | AVW85844.1 Flavivirus polyprotein |
| | propeptide |
| 2612 | AVW85844.1 small envelope protein M |
| 2613 | AVW85844.1 Flavivirus envelope |
| | glycoprotein M |
| 2614 | AVW85845.1 protein pr |
| 2615 | AVW85845.1 Flavivirus polyprotein |
| | propeptide |
| 2616 | AVW85845.1 small envelope protein M |
| 2617 | AVW85845.1 Flavivirus envelope |
| | glycoprotein M |
| 2618 | AVW85846.1 protein pr |
| 2619 | AVW85846.1 Flavivirus polyprotein |
| | propeptide |
| 2620 | AVW85846.1 small envelope protein M |
| 2621 | AVW85846.1 Flavivirus envelope |
| | glycoprotein M |
| 2622 | AVW85847.1 protein pr |
| 2623 | AVW85847.1 Flavivirus polyprotein |
| | propeptide |
| 2624 | AVW85847.1 small envelope protein M |
| 2625 | AVW85847.1 Flavivirus envelope |
| | glycoprotein M |
| 2626 | AVW85848.1 protein pr |
| 2627 | AVW85848.1 Flavivirus polyprotein |
| | propeptide |
| 2628 | AVW85848.1 small envelope protein M |
| 2629 | AVW85848.1 Flavivirus envelope |
| | glycoprotein M |
| 2630 | AVW85849.1 protein pr |
| 2631 | AVW85849.1 Flavivirus polyprotein |
| | propeptide |
| 2632 | AVW85849.1 small envelope protein M |
| 2633 | AVW85849.1 Flavivirus envelope |
| | glycoprotein M |
| 2634 | AVW85850.1 protein pr |
| 2635 | AVW85850.1 Flavivirus polyprotein |
| | propeptide |
| 2636 | AVW85850.1 small envelope protein M |
| 2637 | AVW85850.1 Flavivirus envelope |
| | glycoprotein M |
| 2638 | AVW85851.1 protein pr |
| 2639 | AVW85851.1 Flavivirus polyprotein |
| | propeptide |
| 2640 | AVW85851.1 small envelope protein M |
| 2641 | AVW85851.1 Flavivirus envelope |
| | glycoprotein M |
| 2642 | AVW85852.1 protein pr |
| 2643 | AVW85852.1 Flavivirus polyprotein |
| | propeptide |
| 2644 | AVW85852.1 small envelope protein M |
| 2645 | AVW85852.1 Flavivirus envelope |
| | glycoprotein M |
| 2646 | AVW85853.1 protein pr |
| 2647 | AVW85853.1 Flavivirus polyprotein |
| | propeptide |
| 2648 | AVW85853.1 small envelope protein M |
| 2649 | AVW85853.1 Flavivirus envelope |
| | glycoprotein M |
| 2650 | AVW85854.1 protein pr |
| 2651 | AVW85854.1 Flavivirus polyprotein |
| | propeptide |
| 2652 | AVW85854.1 small envelope protein M |
| 2653 | AVW85854.1 Flavivirus envelope |
| | glycoprotein M |
| 2654 | AVW85855.1 protein pr |
| 2655 | AVW85855.1 Flavivirus polyprotein |
| | propeptide |
| 2656 | AVW85855.1 small envelope protein M |
| 2657 | AVW85855.1 Flavivirus envelope |
| | glycoprotein M |
| 2658 | AVW85856.1 protein pr |
| 2659 | AVW85856.1 Flavivirus polyprotein |
| | propeptide |
| 2660 | AVW85856.1 small envelope protein M |
| 2661 | AVW85856.1 Flavivirus envelope |
| | glycoprotein M |
| 2662 | AVW85857.1 protein pr |
| 2663 | AVW85857.1 Flavivirus polyprotein |
| | propeptide |
| 2664 | AVW85857.1 small envelope protein M |
| 2665 | AVW85857.1 Flavivirus envelope |
| | glycoprotein M |
| 2666 | AVW85858.1 protein pr |
| 2667 | AVW85858.1 Flavivirus polyprotein |
| | propeptide |
| 2668 | AVW85858.1 small envelope protein M |
| 2669 | AVW85858.1 Flavivirus envelope |
| | glycoprotein M |
| 2670 | AVW85859.1 protein pr |
| 2671 | AVW85859.1 Flavivirus polyprotein |
| | propeptide |
| 2672 | AVW85859.1 small envelope protein M |
| 2673 | AVW85859.1 Flavivirus envelope |
| | glycoprotein M |
| 2674 | AVW85860.1 protein pr |
| 2675 | AVW85860.1 Flavivirus polyprotein |
| | propeptide |
| 2676 | AVW85860.1 small envelope protein M |
| 2677 | AVW85860.1 Flavivirus envelope |
| | glycoprotein M |
| 2678 | AVW85861.1 protein pr |
| 2679 | AVW85861.1 Flavivirus polyprotein |
| | propeptide |
| 2680 | AVW85861.1 small envelope protein M |
| 2681 | AVW85861.1 Flavivirus envelope |
| | glycoprotein M |
| 2682 | AVW85862.1 protein pr |
| 2683 | AVW85862.1 Flavivirus polyprotein |
| | propeptide |
| 2684 | AVW85862.1 small envelope protein M |
| 2685 | AVW85862.1 Flavivirus envelope |
| | glycoprotein M |
| 2686 | AVW85863.1 protein pr |
| 2687 | AVW85863.1 Flavivirus polyprotein |
| | propeptide |
| 2688 | AVW85863.1 small envelope protein M |
| 2689 | AVW85863.1 Flavivirus envelope |
| | glycoprotein M |
| 2690 | BBC70847.1 Flavivirus polyprotein |
| | propeptide |
| 2691 | BBC70847.1 Flavivirus envelope |
| | glycoprotein M |
| 2692 | AVG19275.1 Flavivirus polyprotein |
| | propeptide |
| 2693 | AVG19275.1 Flavivirus envelope |
| | glycoprotein M |
| 2694 | AUI42329.1 Flavivirus polyprotein |
| | propeptide |
| 2695 | AUI42329.1 Flavivirus envelope |
| | glycoprotein M |
| 2696 | AUI42330.1 Flavivirus polyprotein |
| | propeptide |
| 2697 | AUI42330.1 Flavivirus envelope |
| | glycoprotein M |
| 2698 | ARB08102.1 Flavivirus polyprotein |
| | propeptide |
| 2699 | ATB53752.1 Flavivirus polyprotein |
| | propeptide |
| 2700 | AQS26698.1 Flavivirus polyprotein |
| | propeptide |
| 2701 | AQS26698.1 Flavivirus envelope |
| | glycoprotein M |
| 2702 | ASF57880.1 Flavivirus polyprotein |
| | propeptide |
| 2703 | ASB32509.1 Flavivirus polyprotein |
| | propeptide |
| 2704 | APW84872.1 Flavivirus polyprotein |
| | propeptide |
| 2705 | APW84873.1 Flavivirus polyprotein |
| | propeptide |
| 2706 | APW84874.1 Flavivirus polyprotein |
| | propeptide |
| 2707 | APW84875.1 Flavivirus polyprotein |
| | propeptide |
| 2708 | APW84876.1 Flavivirus polyprotein |
| | propeptide |
| 2709 | APW84877.1 Flavivirus polyprotein |
| | propeptide |
| 2710 | ARM59239.1 Flavivirus polyprotein |
| | propeptide |
| 2711 | ARM59239.1 Flavivirus envelope |
| | glycoprotein M |
| 2712 | ARM59240.1 protein pr |
| 2713 | ARM59240.1 Flavivirus polyprotein |
| | propeptide |
| 2714 | ARM59240.1 small envelope protein M |
| 2715 | ARM59240.1 Flavivirus envelope |
| | glycoprotein M |
| 2716 | AMX81915.1 Flavivirus polyprotein |
| | propeptide |
| 2717 | AMX81915.1 Flavivirus envelope |
| | glycoprotein M |
| 2718 | AMX81916.1 Flavivirus polyprotein |
| | propeptide |
| 2719 | AMX81916.1 Flavivirus envelope |
| | glycoprotein M |
| 2720 | AMX81917.1 Flavivirus polyprotein |
| | propeptide |
| 2721 | AMX81917.1 Flavivirus envelope |
| | glycoprotein M |
| 2722 | AQZ41947.1 protein pr |
| 2723 | AQZ41947.1 Flavivirus polyprotein |
| | propeptide |
| 2724 | AQZ41947.1 small envelope protein M |
| 2725 | AQZ41948.1 protein pr |
| 2726 | AQZ41948.1 Flavivirus polyprotein |
| | propeptide |
| 2727 | AQZ41948.1 small envelope protein M |
| 2728 | AQZ41949.1 protein pr |
| 2729 | AQZ41949.1 Flavivirus polyprotein |
| | propeptide |
| 2730 | AQZ41949.1 small envelope protein M |
| 2731 | AQZ41949.1 Flavivirus envelope |
| | glycoprotein M |
| 2732 | AQZ41950.1 protein pr |
| 2733 | AQZ41950.1 Flavivirus polyprotein |
| | propeptide |
| 2734 | AQZ41950.1 small envelope protein M |
| 2735 | AQZ41951.1 protein pr |
| 2736 | AQZ41951.1 Flavivirus polyprotein |
| | propeptide |
| 2737 | AQZ41951.1 small envelope protein M |
| 2738 | AQZ41952.1 protein pr |
| 2739 | AQZ41952.1 Flavivirus polyprotein |
| | propeptide |
| 2740 | AQZ41952.1 small envelope protein M |
| 2741 | AQZ41952.1 Flavivirus envelope |
| | glycoprotein M |
| 2742 | AQZ41953.1 protein pr |
| 2743 | AQZ41953.1 Flavivirus polyprotein |
| | propeptide |
| 2744 | AQZ41953.1 small envelope protein M |
| 2745 | AQZ41953.1 Flavivirus envelope |
| | glycoprotein M |
| 2746 | AQZ41954.1 protein pr |
| 2747 | AQZ41954.1 Flavivirus polyprotein |
| | propeptide |
| 2748 | AQZ41954.1 small envelope protein M |
| 2749 | AQZ41955.1 protein pr |
| 2750 | AQZ41955.1 Flavivirus polyprotein |
| | propeptide |
| 2751 | AQZ41955.1 small envelope protein M |
| 2752 | AQZ41955.1 Flavivirus envelope |
| | glycoprotein M |
| 2753 | AQZ41956.1 protein pr |
| 2754 | AQZ41956.1 Flavivirus polyprotein |
| | propeptide |
| 2755 | AQZ41956.1 small envelope protein M |
| 2756 | AQW43707.1 Flavivirus polyprotein |
| | propeptide |
| 2757 | AQW43707.1 Flavivirus envelope |
| | glycoprotein M |
| 2758 | AQW43708.1 Flavivirus polyprotein |
| | propeptide |
| 2759 | AQW43708.1 Flavivirus envelope |
| | glycoprotein M |
| 2760 | BAX00477.1 Flavivirus polyprotein |
| | propeptide |
| 2761 | BAX00477.1 Flavivirus envelope |
| | glycoprotein M |
| 2762 | AQV07165.1 protein pr |
| 2763 | AQV07165.1 Flavivirus polyprotein |
| | propeptide |
| 2764 | AQV07165.1 small envelope protein M |
| 2765 | AQV07165.1 Flavivirus envelope |
| | glycoprotein M |
| 2766 | AOO19564.1 protein pr |
| 2767 | AOO19564.1 Flavivirus polyprotein |
| | propeptide |
| 2768 | AOO19564.1 membrane glycoprotein M |
| 2769 | AOO19564.1 Flavivirus envelope |
| | glycoprotein M |
| 2770 | APO36913.1 Flavivirus polyprotein |
| | propeptide |
| 2771 | APO36913.1 Flavivirus envelope |
| | glycoprotein M |
| 2772 | AMM43325.1 Flavivirus polyprotein |
| | propeptide |
| 2773 | AMM43325.1 Flavivirus envelope |
| | glycoprotein M |
| 2774 | AMM43326.1 Flavivirus polyprotein |
| | propeptide |
| 2775 | AMM43326.1 Flavivirus envelope |
| | glycoprotein M |
| 2776 | APH11492.1 membrane glycoprotein |
| | precursor M |
| 2777 | APH11492.1 Flavivirus polyprotein |
| | propeptide |
| 2778 | APH11492.1 Flavivirus envelope |
| | glycoprotein M |
| 2779 | APO08503.1 Flavivirus polyprotein |
| | propeptide |
| 2780 | APC60216.2 Flavivirus polyprotein |
| | propeptide |
| 2781 | APC60216.2 Flavivirus envelope |
| | glycoprotein M |
| 2782 | ANH22038.1 Flavivirus polyprotein |
| | propeptide |
| 2783 | BAV82373.1 Flavivirus polyprotein |
| | propeptide |
| 2784 | AOR82892.1 Flavivirus polyprotein |
| | propeptide |
| 2785 | AOR82893.1 Flavivirus polyprotein |
| | propeptide |
| 2786 | AOR51315.1 Flavivirus polyprotein |
| | propeptide |
| 2787 | AOR51315.1 Flavivirus envelope |
| | glycoprotein M |
| 2788 | AND01116.2 Flavivirus polyprotein |
| | propeptide |
| 2789 | AND01116.2 Flavivirus envelope |
| | glycoprotein M |
| 2790 | AOG18296.1 Flavivirus polyprotein |
| | propeptide |
| 2791 | AOG18296.1 Flavivirus envelope |
| | glycoprotein M |
| 2792 | AOC50652.1 protein pr |
| 2793 | AOC50652.1 small envelope protein M |
| 2794 | AOC50653.1 protein pr |
| 2795 | AOC50653.1 small envelope protein M |
| 2796 | AOC50654.1 protein pr |
| 2797 | AOC50654.1 small envelope protein M |
| 2798 | ANZ46736.1 Flavivirus polyprotein |
| | propeptide |
| 2799 | ANW07474.2 protein pr |
| 2800 | ANW07474.2 Flavivirus polyprotein |
| | propeptide |
| 2801 | ANW07474.2 small envelope protein M |
| 2802 | ANW07475.1 protein pr |
| 2803 | ANW07475.1 small envelope protein M |
| 2804 | ANW07476.1 protein pr |
| 2805 | ANW07476.1 Flavivirus polyprotein |
| | propeptide |
| 2806 | ANW07476.1 small envelope protein M |
| 2807 | ANW07477.1 protein pr |
| 2808 | ANW07477.1 Flavivirus polyprotein |
| | propeptide |
| 2809 | ANW07477.1 small envelope protein M |
| 2810 | ANW07477.1 Flavivirus envelope |
| | glycoprotein M |
| 2811 | ANN44857.1 Flavivirus polyprotein |
| | propeptide |
| 2812 | ANN44857.1 Flavivirus envelope |
| | glycoprotein M |
| 2813 | ANN83272.1 protein pr |
| 2814 | ANN83272.1 small envelope protein M |
| 2815 | ANN83273.1 protein pr |
| 2816 | ANN83273.1 small envelope protein M |
| 2817 | ANK57897.1 Flavivirus polyprotein |
| | propeptide |
| 2818 | ANK57897.1 Flavivirus envelope |
| | glycoprotein M |
| 2819 | ANH10698.1 Flavivirus polyprotein |
| | propeptide |
| 2820 | ANG09399.1 Flavivirus polyprotein |
| | propeptide |
| 2821 | ANF16414.1 Flavivirus polyprotein |
| | propeptide |
| 2822 | ANF16414.1 Flavivirus envelope |
| | glycoprotein M |
| 2823 | ANC90427.1 protein pr |
| 2824 | ANC90427.1 small envelope protein M |
| 2825 | ANC90428.1 protein pr |
| 2826 | ANC90428.1 Flavivirus polyprotein |
| | propeptide |
| 2827 | ANC90428.1 small envelope protein M |
| 2828 | ANC90428.1 Flavivirus envelope |
| | glycoprotein M |
| 2829 | ANB66182.1 protein pr |
| 2830 | ANB66182.1 Flavivirus polyprotein |
| | propeptide |
| 2831 | ANB66182.1 small envelope protein M |
| 2832 | ANB66182.1 Flavivirus envelope |
| | glycoprotein M |
| 2833 | ANB66183.1 protein pr |
| 2834 | ANB66183.1 Flavivirus polyprotein |
| | propeptide |
| 2835 | ANB66183.1 small envelope protein M |
| 2836 | ANB66184.1 protein pr |
| 2837 | ANB66184.1 small envelope protein M |
| 2838 | ANA12599.1 Flavivirus polyprotein |
| | propeptide |
| 2839 | ANA12599.1 Flavivirus envelope |
| | glycoprotein M |
| 2840 | AMX81919.1 Flavivirus polyprotein |
| | propeptide |
| 2841 | AMX81919.1 Flavivirus envelope |
| | glycoprotein M |
| 2842 | AMR39832.1 Flavivirus polyprotein |
| | propeptide |
| 2843 | AMR39833.1 Flavivirus polyprotein |
| | propeptide |
| 2844 | AMR39833.1 Flavivirus envelope |
| | glycoprotein M |
| 2845 | AMR39834.1 Flavivirus polyprotein |
| | propeptide |
| 2846 | AMR39835.1 Flavivirus polyprotein |
| | propeptide |
| 2847 | AMR39835.1 Flavivirus envelope |
| | glycoprotein M |
| 2848 | AMR39836.1 Flavivirus polyprotein |
| | propeptide |
| 2849 | AMR39836.1 Flavivirus envelope |
| | glycoprotein M |
| 2850 | AMQ48986.1 Flavivirus polyprotein |
| | propeptide |
| 2851 | AMQ48986.1 Flavivirus envelope |
| | glycoprotein M |
| 2852 | AMQ48981.1 membrane glycoprotein |
| | precursor M |
| 2853 | AMQ48981.1 protein pr |
| 2854 | AMQ48981.1 Flavivirus polyprotein |
| | propeptide |
| 2855 | AMQ48981.1 membrane glycoprotein M |
| 2856 | AMQ48981.1 Flavivirus envelope |
| | glycoprotein M |
| 2857 | AMQ48982.1 membrane glycoprotein |
| | precursor M |
| 2858 | AMQ48982.1 protein pr |
| 2859 | AMQ48982.1 Flavivirus polyprotein |
| | propeptide |
| 2860 | AMQ48982.1 membrane glycoprotein M |
| 2861 | AMQ48982.1 Flavivirus envelope |
| | glycoprotein M |
| 2862 | AMQ34003.1 protein pr |
| 2863 | AMQ34003.1 Flavivirus polyprotein |
| | propeptide |
| 2864 | AMQ34003.1 membrane glycoprotein M |
| 2865 | AMQ34003.1 Flavivirus envelope |
| | glycoprotein M |
| 2866 | AMQ34004.1 protein pr |
| 2867 | AMQ34004.1 Flavivirus polyprotein |
| | propeptide |
| 2868 | AMQ34004.1 membrane glycoprotein M |
| 2869 | AMQ34004.1 Flavivirus envelope |
| | glycoprotein M |
| 2870 | AMN14619.1 Flavivirus polyprotein |
| | propeptide |
| 2871 | AMN14619.1 Flavivirus envelope |
| | glycoprotein M |
| 2872 | AMN14620.1 Flavivirus polyprotein |
| | propeptide |
| 2873 | AMM39806.1 Flavivirus polyprotein |
| | propeptide |
| 2874 | AMM39806.1 Flavivirus envelope |
| | glycoprotein M |
| 2875 | AMK79469.1 Flavivirus polyprotein |
| | propeptide |
| 2876 | AMK79469.1 Flavivirus envelope |
| | glycoprotein M |
| 2877 | AMD16557.1 Flavivirus polyprotein |
| | propeptide |
| 2878 | AMD16557.1 Flavivirus envelope |
| | glycoprotein M |
| 2879 | AMH87239.1 Flavivirus polyprotein |
| | propeptide |
| 2880 | AMB18850.1 Flavivirus polyprotein |
| | propeptide |
| 2881 | AMB18850.1 Flavivirus envelope |
| | glycoprotein M |
| 2882 | AMD61710.1 Flavivirus polyprotein |
| | propeptide |
| 2883 | AMD61710.1 Flavivirus envelope |
| | glycoprotein M |
| 2884 | AMD61711.1 Flavivirus polyprotein |
| | propeptide |
| 2885 | AMD61711.1 Flavivirus envelope |
| | glycoprotein M |
| 2886 | AMB37295.1 Flavivirus polyprotein |
| | propeptide |
| 2887 | AMB37295.1 Flavivirus envelope |
| | glycoprotein M |
| 2888 | AMC13911.1 Flavivirus polyprotein |
| | propeptide |
| 2889 | AMC13911.1 Flavivirus envelope |
| | glycoprotein M |
| 2890 | ALU33341.1 Flavivirus polyprotein |
| | propeptide |
| 2891 | ALU33341.1 Flavivirus envelope |
| | glycoprotein M |
| 2892 | BAP47441.1 Flavivirus polyprotein |
| | propeptide |
| 2893 | BAP47441.1 Flavivirus envelope |
| | glycoprotein M |
| 2894 | AHZ13508.1 Flavivirus polyprotein |
| | propeptide |
| 2895 | AAV34151.1 Flavivirus polyprotein |
| | propeptide |

TABLE 1G
Non-limiting example Zika 3′ UTR sequences by accession number

| | |
|---|---|
| KU527068.1 Zika virus strain Natal RGN, complete | KU761561.1 Zika virus isolate ZJ02, complete |
| genome | genome |
| NC_035889.1 Zika virus isolate ZIKV/H. | KU761560.1 Zika virus isolate ZJ03, complete |
| sapiens/Brazil/Natal/2015, complete genome | genome |
| KY765321.1 Zika virus strain ZIKV/Homo | MH013290.1 Zika virus isolate BKK07, complete |
| sapiens/NIC/4886_12A1_SP/2016, complete | genome |
| genome | |
| KU509998.3 Zika virus strain Haiti/1225/2014, | MK241416.1 Zika virus isolate |
| complete genome | ZIKV/Homo_sapiens/CPV/2015/CV487, complete |
| | genome |
| KX247646.1 Zika virus isolate Zika virus/Homo | MH882534.1 Zika virus isolate Zika virus/H. sapiens- |
| sapiens/COL/UF-1/2016, complete genome | wt/BRA/2016/ZKV17Gsem_2016-06-08, complete |
| | genome |
| KX702400.1 Zika virus strain Zika virus/Homo | MH882532.1 Zika virus isolate Zika virus/H. sapiens- |
| sapiens/VEN/UF-1/2016, complete genome | wt/BRA/2016/ZKV17Esem_2016-05-24, complete |
| | genome |
| KX893855.1 Zika virus strain Zika virus/Homo | MH882530.1 Zika virus isolate Zika virus/H. sapiens- |
| sapiens/VEN/UF-2/2016, complete genome | wt/BRA/2016/ZKV17Csem_2016-05-10, complete |
| | genome |
| KY415991.1 Zika virus isolate Haiti/0097/2014, | MH882531.1 Zika virus isolate Zika virus/H. sapiens- |
| complete genome | wt/BRA/2016/ZKV17Dsem_2016-05-17, complete |
| | genome |
| KY415990.1 Zika virus isolate Haiti/0036/2014, | MH882540.1 Zika virus isolate Zika virus/H. sapiens- |
| complete genome | wt/BRA/2016/ZKV17Nsem 2016-07-27, complete |
| | genome |
| KY415989.1 Zika virus isolate Haiti/0074/2014, | MT377494.1 Zika virus isolate MU-DMSC-3/2017, |
| complete genome | complete genome |
| KY415988.1 Zika virus isolate Haiti/0054/2014, | MH882533.1 Zika virus isolate Zika virus/H. sapiens- |
| complete genome | wt/BRA/2016/ZKV17Fsem_2016-05-31, complete |
| | genome |
| KY415987.1 Zika virus isolate Haiti/0033/2014, | MZ008356.1 Zika virus isolate |
| complete genome | ZIKV/Homo_sapiens/Cambodia/2019/SZ1901, |
| | complete genome |
| KY415986.1 Zika virus isolate Haiti/0029/2014, | MH882539.1 Zika virus isolate Zika virus/H. sapiens- |
| complete genome | wt/BRA/2016/ZKV17Msem_2016-07-19, complete |
| | genome |
| MF384325.1 Zika virus isolate | KU681081.3 Zika virus isolate Zika virus/H. sapiens- |
| mosquito/Haiti/1682/2016, complete genome | tc/THA/2014/SV0127- 14, complete genome |
| MF783073.1 Zika virus strain Zika | KU955593.1 Zika virus isolate Zika virus/H. sapiens- |
| virus/mosquito/Haiti/1919/2016, complete genome | tc/KHM/2010/FSS13025, complete genome |
| MF783072.1 Zika virus strain Zika | KX694532.2 Zika virus strain ZIKV/Homo |
| virus/mosquito/Haiti/1855/2016, complete genome | sapiens/THA/PLCal_ZV/2013, complete genome |
| MN577544.1 Zika virus isolate Haiti/0148/2016, | KY272987.1 Zika virus isolate SI-BKK01, complete |
| complete genome | genome |
| MN577543.1 Zika virus isolate Haiti/1327/2014, | MH158236.1 Zika virus isolate FSS13025, complete |
| complete genome | genome |
| MN566108.1 Zika virus isolate Haiti/0866/2016, | MH675629.1 Zika virus isolate QTX-02, complete |
| complete genome | genome |
| MN566107.1 Zika virus isolate Haiti/0165/2016, | MW015936.1 Zika virus isolate Zika |
| complete genome | virus/H. sapiens-tc/THA/2006/CVD_06-020, |
| | complete genome |
| MN566106.1 Zika virus isolate Haiti/0395/2016, | KX051560.1 Zika virus isolate SK364/13AS, |
| complete genome | complete genome |
| MN566105.1 Zika virus isolate Haiti/0375/2016, | MT377502.1 Zika virus isolate NS-274/2006, |
| complete genome | complete genome |
| MN566104.1 Zika virus isolate Haiti/0011/2016, | MT377492.1 Zika virus isolate MU-DMSC-1/2016, |
| complete genome | complete genome |
| OL450366.1 Zika virus isolate | MT377491.1 Zika virus isolate MU-DMSC-1/2017, |
| ZIKV/Haiti/1332/2015, complete genome | complete genome |
| OL450365.1 Zika virus isolate | MG770187.1 Zika virus isolate SV0127-14, |
| ZIKV/Haiti/0478/2015, complete genome | complete genome |
| OL450364.1 Zika virus isolate | MT377495.1 Zika virus isolate MU-DMSC-4/2017, |
| ZIKV/Haiti/1238/2015, complete genome | complete genome |
| KX051563.1 Zika virus isolate Haiti/1/2016, | MT377503.1 Zika virus isolate 15-1144, complete |
| complete genome | genome |
| KU926310.2 Zika virus isolate Rio-S1, complete | MG770188.1 Zika virus isolate SV0127-14, |
| genome | complete genome |
| KU926309.2 Zika virus isolate Rio-U1, complete | KX051562.1 Zika virus isolate SV0010/15, complete |
| genome | genome |
| KX087102.2 Zika virus strain ZIKV/Homo | LC369584.1 Zika virus ZIKV/Hu/Thai/KngSG/17- |
| sapiens/COL/FLR/2015, complete genome | D501 genomic RNA, nearly complete genome |
| KX156776.2 Zika virus strain ZIKV/Homo | MT377500.1 Zika virus isolate MU-DMSC-6/2016, |
| sapiens/PAN/CDC-259364_V1-V2/2015, complete | complete genome |
| genome | |
| KX156774.2 Zika virus strain ZIKV/Homo | MT377504.1 Zika virus isolate NS-110/2006, |
| sapiens/PAN/CDC-259359_V1-V3/2015, complete | complete genome |
| genome | |
| KX197192.1 Zika virus isolate | MT377493.1 Zika virus isolate MU-DMSC-2/2017, |
| ZIKV/H. sapiens/Brazil/PE243/2015, complete | complete genome |
| genome | |
| KX280026.1 Zika virus isolate Paraiba_01, | MN101548.1 Zika virus isolate Salvador, complete |
| complete genome | genome |
| KX377337.1 Zika virus strain PRVABC-59, | MT377501.1 Zika virus isolate MU-DMSC-5/2017, |
| complete genome | complete genome |
| KX446951.2 Zika virus strain | KX051561.1 Zika virus isolate SK403/13AS, |
| ZIKV/Aedes. sp/MEX/MEX_I-7/2016, complete | complete genome |
| genome | |
| KX446950.2 Zika virus strain | MH119185.1 Zika virus isolate DMSc05684-16, |
| ZIKV/Aedes. sp/MEX/MEX_2-81/2016, complete | complete genome |
| genome | |
| KY328289.1 Zika virus isolate HN16, complete | LC219720.1 Zika virus genomic RNA, complete |
| genome | genome, strain: ZIKV/Hu/NIID123/2016 |
| KY348640.1 Zika virus strain SL1602, complete | KX377336.1 Zika virus strain P6-740, complete |
| genome | genome |
| KY989971.1 Zika virus isolate FLA, complete | KX694533.2 Zika virus strain ZIKV/Aedes |
| genome | aegypti/MYS/P6-740/1966, complete genome |
| MH158237.1 Zika virus isolate PRVABC59, | MH675626.1 Zika virus isolate CTS-183-16p, |
| complete genome | complete genome |
| MF073358.1 Zika virus isolate 15261, complete | MH675621.1 Zika virus isolate CTS-47-16p, |
| genome | complete genome |
| MF073357.1 Zika virus isolate 16288, complete | MT377498.1 Zika virus isolate MU-DMSC-4/2016, |
| genome | complete genome |
| MH544701.2 Zika virus isolate | MN611472.1 Zika virus isolate 2019YNZIKV02, |
| 459148_Meta_Colombia_2016, complete genome | complete genome |
| MH675630.1 Zika virus isolate QTX-04, complete | KX601167.1 Zika virus strain ZIKV/Aedes |
| genome | sp./MYS/P6-740/1966, complete genome |
| MH675628.1 Zika virus isolate CTS-223-16p, | MT377499.1 Zika virus isolate MU-DMSC-5/2016, |
| complete genome | complete genome |
| MH675625.1 Zika virus isolate CTS-178-16p, | MT377497.1 Zika virus isolate MU-DMSC-3/2016, |
| complete genome | complete genome |
| MH675624.1 Zika virus isolate CTS-61-16p, | MT377496.1 Zika virus isolate MU-DMSC-2/2016, |
| complete genome | complete genome |
| MN577550.1 Zika virus isolate ZIKV- | MH061852.1 Zika virus strain ZIKV/Macaca |
| Nicaragua/2016-UCB7420, complete genome | mulatta/UGA/MR-766-VEROE6-AC11-P5_08/1947, |
| | complete genome |
| MT507050.1 Zika virus isolate S-542/Yucatan/2017 | MH061907.1 Zika virus strain ZIKV/Macaca |
| clone 6A, complete genome | mulatta/UGA/MR-766-VEROE6-GA3-P10_06/1947, |
| | complete genome |
| MT507049.1 Zika virus isolate S-542/Yucatan/2017 | MH061902.1 Zika virus strain ZIKV/Macaca |
| clone 6V, complete genome | mulatta/UGA/MR-766-VEROE6-FA12-P7_08/1947, |
| | complete genome |
| MT507048.1 Zika virus isolate S-542/Yucatan/2017 | MH061866.1 Zika virus strain ZIKV/Macaca |
| clone 6C, complete genome | mulatta/UGA/MR-766-VEROE6-GD12- |
| | P10_07/1947, complete genome |
| MT507047.1 Zika virus isolate S- | MH061914.1 Zika virus strain ZIKV/Macaca |
| 542/Yucatan/2017, complete genome | mulatta/UGA/MR-766-VEROE6-GA3-P10_02/1947, |
| | complete genome |
| OK571913.1 Zika virus isolate Homo | MH061915.1 Zika virus strain ZIKV/Macaca |
| sapiens/Haiti/0728/2014, complete genome | mulatta/UGA/MR-766-VEROE6-P12_02/1947, |
| | complete genome |
| KX087101.3 Zika virus strain ZIKV/Homo | MH061904.1 Zika virus strain ZIKV/Macaca |
| sapiens/PRI/PRVABC59/2015, complete genome | mulatta/UGA/MR-766-VEROE6-FC3-P8_02/1947, |
| | complete genome |
| KX156775.2 Zika virus strain ZIKV/Homo | MH061900.1 Zika virus strain ZIKV/Macaca |
| sapiens/PAN/CDC-259249_V1-V3/2015, complete | mulatta/UGA/MR-766-VEROE6-P12_04/1947, |
| genome | complete genome |
| LC190723.1 Zika virus genomic RNA, complete | MH061896.1 Zika virus strain ZIKV/Macaca |
| genome, strain: ZIKV/Hu/Yokohama/1/2016 | mulatta/UGA/MR-766-VEROE6-FC3-P8_04/1947, |
| | complete genome |
| MF352141.1 Zika virus isolate PE243, complete | MH061887.1 Zika virus strain ZIKV/Macaca |
| genome | mulatta/UGA/MR-766-VEROE6-P12_05/1947, |
| | complete genome |
| MH900227.1 Zika virus isolate 31N, complete | MH061870.1 Zika virus strain ZIKV/Macaca |
| genome | mulatta/UGA/MR-766-VEROE6-AC11-P5_05/1947, |
| | complete genome |
| KU870645.1 Zika virus isolate FB-GWUH-2016, | MH061857.1 Zika virus strain ZIKV/Macaca |
| complete genome | mulatta/UGA/MR-766-VEROE6-AC11-P5_07/1947, |
| | complete genome |
| KX827268.1 Zika virus strain ZIKV/Homo | MH061853.1 Zika virus strain ZIKV/Macaca |
| sapiens/USA/UT-1/2016, complete genome | mulatta/UGA/MR-766-VEROE6-GD12- |
| | P10_04/1947, complete genome |
| MN100039.1 Zika virus isolate ZIKV/Homo | MH061880.1 Zika virus strain ZIKV/Macaca |
| sapiens/PAN/CDC-259249_V1-V3/2015, complete | mulatta/UGA/MR-766-VEROE6-P12_08/1947, |
| genome | complete genome |
| MH882544.1 Zika virus isolate Zika | MH061913.1 Zika virus strain ZIKV/Macaca |
| virus/H. sapiens-wt/BRA/2016/ZKV19Bsem 2016- | mulatta/UGA/MR-766-VEROE6-GA3-P10_05/1947, |
| 05-12, complete genome | complete genome |
| MN124090.1 Zika virus isolate ZIKV/Homo | MH061912.1 Zika virus strain ZIKV/Macaca |
| sapiens/PAN/CDC-259249_V1-V3/2015, complete | mulatta/UGA/MR-766-VEROE6-GA3-P10_03/1947, |
| genome | complete genome |
| MN124091.1 Zika virus isolate ZIKV/Homo | MH061910.1 Zika virus strain ZIKV/Macaca |
| sapiens/PAN/CDC-259249_V1-V3/2015, complete | mulatta/UGA/MR-766-VEROE6-FA12-P7_04/1947, |
| genome | complete genome |
| MH882547.1 Zika virus isolate Zika | MH061909.1 Zika virus strain ZIKV/Macaca |
| virus/H. sapiens-wt/BRA/2016/ZKV19Esem_2016- | mulatta/UGA/MR-766-VEROE6-AC11-P5_04/1947, |
| 06-02, complete genome | complete genome |
| KX856011.1 Zika virus strain ZIKV/Aedes | MH061908.1 Zika virus strain ZIKV/Macaca |
| sp./MEX_I-44/2016, complete genome | mulatta/UGA/MR-766-VEROE6-P12_06/1947, |
| | complete genome |
| KY120348.1 Zika virus strain MEX_CIENI551P4, | MH061906.1 Zika virus strain ZIKV/Macaca |
| complete genome | mulatta/UGA/MR-766-VEROE6-FC11-P7_01/1947, |
| | complete genome |
| KY765327.1 Zika virus strain ZIKV/Homo | MH061905.1 Zika virus strain ZIKV/Macaca |
| sapiens/NIC/5005_13A1_SP/2016, complete | mulatta/UGA/MR-766-VEROE6-AA1-P8_01/1947, |
| genome | complete genome |
| KY765325.1 Zika virus strain ZIKV/Homo | MH061903.1 Zika virus strain ZIKV/Macaca |
| sapiens/NIC/5005_13A1/2016, complete genome | mulatta/UGA/MR-766-VEROE6-AA1-P8_04/1947, |
| | complete genome |
| KY765323.1 Zika virus strain ZIKV/Homo | MH061901.1 Zika virus strain ZIKV/Macaca |
| sapiens/NIC/6188_13A1/2016, complete genome | mulatta/UGA/MR-766-VEROE6-GA3-P10_07/1947, |
| | complete genome |
| KY765320.1 Zika virus strain ZIKV/Homo | MH061899.1 Zika virus strain ZIKV/Macaca |
| sapiens/NIC/6406_13A1_SP/2016, complete | mulatta/UGA/MR-766-VEROE6-AA1-P8_08/1947, |
| genome | complete genome |
| KY765317.1 Zika virus strain ZIKV/Homo | MH061898.1 Zika virus strain ZIKV/Macaca |
| sapiens/NIC/7252_12A1/2016, complete genome | mulatta/UGA/MR-766-VEROE6-FC11-P7_02/1947, |
| | complete genome |
| KX766029.1 Zika virus isolate R116265, complete | MH061897.1 Zika virus strain ZIKV/Macaca |
| genome | mulatta/UGA/MR-766-VEROE6-FC3-P8_01/1947, |
| | complete genome |
| KY631494.1 Zika virus isolate MEX_ENCB165P4, | MH061895.1 Zika virus strain ZIKV/Macaca |
| complete genome | mulatta/UGA/MR-766-VEROE6-P12_01/1947, |
| | complete genome |
| KY765318.1 Zika virus strain ZIKV/Homo | MH061894.1 Zika virus strain ZIKV/Macaca |
| sapiens/NIC/4886_12A1/2016, complete genome | mulatta/UGA/MR-766-VEROE6-FC11-P7_03/1947, |
| | complete genome |
| KX673530.1 Zika virus isolate | MH061893.1 Zika virus strain ZIKV/Macaca |
| PHE semen_Guadeloupe, complete genome | mulatta/UGA/MR-766-VEROE6-GD12- |
| | P10_03/1947, complete genome |
| KY765324.1 Zika virus strain ZIKV/Homo | MH061892.1 Zika virus strain ZIKV/Macaca |
| sapiens/NIC/8610_13A1/2016, complete genome | mulatta/UGA/MR-766-VEROE6-P12_03/1947, |
| | complete genome |
| KY631493.1 Zika virus isolate MEX_ENCB165, | MH061891.1 Zika virus strain ZIKV/Macaca |
| complete genome | mulatta/UGA/MR-766-VEROE6-FA12-P7_06/1947, |
| | complete genome |
| KX601168.1 Zika virus strain ZIKV/Homo | MH061890.1 Zika virus strain ZIKV/Macaca |
| Sapiens/PRI/PRVABC59/2015, complete genome | mulatta/UGA/MR-766-VEROE6-FC3-P8_08/1947, |
| | complete genome |
| KX766028.1 Zika virus isolate R114916, complete | MH061889.1 Zika virus strain ZIKV/Macaca |
| genome | mulatta/UGA/MR-766-VEROE6-FC3-P8_07/1947, |
| | complete genome |
| MH513600.1 Zika virus isolate BR/Sinop/H366 | MH061888.1 Zika virus strain ZIKV/Macaca |
| 2P/2015, complete genome | mulatta/UGA/MR-766-VEROE6-AC11-P5_02/1947, |
| | complete genome |
| MH513599.1 Zika virus isolate | MH061886.1 Zika virus strain ZIKV/Macaca |
| BR/Sinop/H366/2015, complete genome | mulatta/UGA/MR-766-VEROE6-FA12-P7_05/1947, |
| | complete genome |
| KU321639.1 Zika virus strain ZikaSPH2015, | MH061885.1 Zika virus strain ZIKV/Macaca |
| complete genome | mulatta/UGA/MR-766-VEROE6-FC3-P8_06/1947, |
| | complete genome |
| KU744693.1 Zika virus isolate VE_Ganxian, | MH061884.1 Zika virus strain ZIKV/Macaca |
| complete genome | mulatta/UGA/MR-766-VEROE6-GA3-P10_01/1947, |
| | complete genome |
| KY648934.1 Zika virus strain ZIKV/Aedes | MH061883.1 Zika virus strain ZIKV/Macaca |
| aegypti/MEX/MEX_I-44/2016, complete genome | mulatta/UGA/MR-766-VEROE6-FC11-P7_08/1947, |
| | complete genome |
| KY765322.1 Zika virus strain ZIKV/Homo | MH061882.1 Zika virus strain ZIKV/Macaca |
| sapiens/NIC/7252_12A1_SP/2016, complete | mulatta/UGA/MR-766-VEROE6-GD12- |
| genome | P10_08/1947, complete genome |
| MH157213.1 Zika virus strain ZIKV/Homo | MH061881.1 Zika virus strain ZIKV/Macaca |
| sapiens/MEX/41-001-F_V3_O/2016, complete | mulatta/UGA/MR-766-VEROE6-GD12- |
| genome | P10_02/1947, complete genome |
| MH157208.1 Zika virus strain ZIKV/Homo | MH061879.1 Zika virus strain ZIKV/Macaca |
| sapiens/MEX/41-022-F_V0_O/2016, complete | mulatta/UGA/MR-766-VEROE6-GD12- |
| genome | P10_05/1947, complete genome |
| MH157202.1 Zika virus strain ZIKV/Homo | MH061878.1 Zika virus strain ZIKV/Macaca |
| sapiens/MEX/41-017-F_V3_O/2016, complete | mulatta/UGA/MR-766-VEROE6-FC3-P8_05/1947, |
| genome | complete genome |
| MH916806.1 Zika virus strain ZIKV/Homo | MH061877.1 Zika virus strain ZIKV/Macaca |
| sapiens/PRI/PRVABC59_8/2015, complete genome | mulatta/UGA/MR-766-VEROE6-FC11-P7_07/1947, |
| | complete genome |
| MH916803.1 Zika virus strain ZIKV/Homo | MH061876.1 Zika virus strain ZIKV/Macaca |
| sapiens/PRI/PRVABC59_1/2015, complete genome | mulatta/UGA/MR-766-VEROE6-P12_07/1947, |
| | complete genome |
| MH916802.1 Zika virus strain ZIKV/Homo | MH061874.1 Zika virus strain ZIKV/Macaca |
| sapiens/PRI/PRVABC59_17/2015, complete | mulatta/UGA/MR-766-VEROE6-AA1-P8_03/1947, |
| genome | complete genome |
| MT483911.1 Zika virus isolate 800/16, complete | MH061873.1 Zika virus strain ZIKV/Macaca |
| genome | mulatta/UGA/MR-766-VEROE6-FA12-P7_01/1947, |
| | complete genome |
| KU922960.1 Zika virus isolate | MH061872.1 Zika virus strain ZIKV/Macaca |
| MEX/InDRE/Sm/2016, complete genome | mulatta/UGA/MR-766-VEROE6-AA1-P8_05/1947, |
| | complete genome |
| KU922923.1 Zika virus isolate | MH061871.1 Zika virus strain ZIKV/Macaca |
| MEX/InDRE/Lm/2016, complete genome | mulatta/UGA/MR-766-VEROE6-FC11-P7_04/1947, |
| | complete genome |
| KY765326.1 Zika virus strain ZIKV/Homo | MH061869.1 Zika virus strain ZIKV/Macaca |
| sapiens/NIC/6188_13A1_SP/2016, complete | mulatta/UGA/MR-766-VEROE6-AA1-P8_06/1947, |
| genome | complete genome |
| KU501215.1 Zika virus strain PRVABC59, | MH061868.1 Zika virus strain ZIKV/Macaca |
| complete genome | mulatta/UGA/MR-766-VEROE6-AA1-P8_07/1947, |
| | complete genome |
| MK713748.1 Zika virus isolate PRVABC59, | MH061867.1 Zika virus strain ZIKV/Macaca |
| complete genome | mulatta/UGA/MR-766-VEROE6-GA3-P10_04/1947, |
| | complete genome |
| MH513598.1 Zika virus isolate | MH061865.1 Zika virus strain ZIKV/Macaca |
| BR/Sinop/H355/2015, complete genome | mulatta/UGA/MR-766-VEROE6-AA1-P8_02/1947, |
| | complete genome |
| KY120349.2 Zika virus strain MEX_CIENI551, | MH061864.1 Zika virus strain ZIKV/Macaca |
| complete genome | mulatta/UGA/MR-766-VEROE6-FA12-P7_07/1947, |
| | complete genome |
| MK241417.1 Zika virus isolate | MH061863.1 Zika virus strain ZIKV/Macaca |
| ZIKV/Homo_sapiens/CPV/2016/CV907u, complete | mulatta/UGA/MR-766-VEROE6-FA12-P7_02/1947, |
| genome | complete genome |
| MK241415.1 Zika virus isolate | MH061862.1 Zika virus strain ZIKV/Macaca |
| ZIKV/Homo_sapiens/CPV/2015/CV448c, complete | mulatta/UGA/MR-766-VEROE6-GD12- |
| genome | P10_01/1947, complete genome |
| KX269878.1 Zika virus isolate Haiti/2016/PD, | MH061861.1 Zika virus strain ZIKV/Macaca |
| complete genome | mulatta/UGA/MR-766-VEROE6-GA3-P10_08/1947, |
| | complete genome |
| KU853013.1 Zika virus isolate Dominican | MH061860.1 Zika virus strain ZIKV/Macaca |
| Republic/2016/PD2, complete genome | mulatta/UGA/MR-766-VEROE6-FC11-P7_06/1947, |
| | complete genome |
| KU853012.1 Zika virus isolate Dominican | MH061859.1 Zika virus strain ZIKV/Macaca |
| Republic/2016/PD1, complete genome | mulatta/UGA/MR-766-VEROE6-AC11-P5_01/1947, |
| | complete genome |
| KU820899.2 Zika virus isolate ZJ03, complete | MH061858.1 Zika virus strain ZIKV/Macaca |
| genome | mulatta/UGA/MR-766-VEROE6-FC11-P7_05/1947, |
| | complete genome |
| KX117076.1 Zika virus isolate Zhejiang04, | MH061856.1 Zika virus strain ZIKV/Macaca |
| complete genome | mulatta/UGA/MR-766-VEROE6-FC3-P8_03/1947, |
| | complete genome |
| KJ776791.2 Zika virus strain H/PF/2013, complete | MH061855.1 Zika virus strain ZIKV/Macaca |
| genome | mulatta/UGA/MR-766-VEROE6-FA12-P7_03/1947, |
| | complete genome |
| KU681082.3 Zika virus isolate Zika | MH061854.1 Zika virus strain ZIKV/Macaca |
| virus/H. sapiens-tc/PHL/2012/CPC-0740, complete | mulatta/UGA/MR-766-VEROE6-AC11-P5_06/1947, |
| genome | complete genome |
| KX198135.2 Zika virus strain ZIKV/Homo | LC002520.1 Zika virus genomic RNA, complete |
| sapiens/PAN/BEI-259634_V4/2016, complete | genome, strain: MR766-NIID |
| genome | |
| KX262887.1 Zika virus isolate 103451, complete | KU955594.1 Zika virus isolate Zika virus/M. mulatta- |
| genome | tc/UGA/1947/MR-766, complete genome |
| KX694534.2 Zika virus strain ZIKV/Homo | KX377335.1 Zika virus strain MR-766, complete |
| sapiens/HND/R103451/2015, complete genome | genome |
| KX806557.3 Zika virus isolate TS17-2016, | MK105975.1 Zika virus strain MR766, complete |
| complete genome | genome |
| KY272991.1 Zika virus isolate RIO-BM1, complete | MW680970.1 Zika virus isolate rGZ02p/2018, |
| genome | complete genome |
| MG827392.1 Zika virus strain PF13/251013-18, | MW680969.1 Zika virus isolate rGZ02a/2018, |
| complete genome | complete genome |
| MF073359.1 Zika virus isolate 15098, complete | MH130109.1 Zika virus strain ZIKV/Macaca |
| genome | mulatta/UGA/MR-766-VEROE6-AC4-P12_06/1947, |
| | complete genome |
| MH675627.1 Zika virus isolate CTS-193-16p, | MH130103.1 Zika virus strain ZIKV/Macaca |
| complete genome | mulatta/UGA/MR-766-VEROE6-AC10- |
| | P12_06/1947, complete genome |
| MH675623.1 Zika virus isolate CTS-56-16p, | MH130100.1 Zika virus strain ZIKV/Macaca |
| complete genome | mulatta/UGA/MR-766-VEROE6-AC4-P12_01/1947, |
| | complete genome |
| MH675622.1 Zika virus isolate CTS-50-16p, | MH130096.1 Zika virus strain ZIKV/Macaca |
| complete genome | mulatta/UGA/MR-766-VEROE6-AC10- |
| | P12_05/1947, complete genome |
| MH675620.1 Zika virus isolate CTS-36-16p, | MH130105.1 Zika virus strain ZIKV/Macaca |
| complete genome | mulatta/UGA/MR-766-VEROE6-AC10- |
| | P12_04/1947, complete genome |
| MK566202.1 Zika virus isolate 15098, complete | MH130108.1 Zika virus strain ZIKV/Macaca |
| genome | mulatta/UGA/MR-766-VEROE6-AC4-P12_04/1947, |
| | complete genome |
| KX879604.1 Zika virus strain | MH130099.1 Zika virus strain ZIKV/Macaca |
| ZIKV/EC/Esmeraldas/089/2016, complete genome | mulatta/UGA/MR-766-VEROE6-AC4-P12_02/1947, |
| | complete genome |
| KX197205.1 Zika virus isolate 9, complete genome | MH130097.1 Zika virus strain ZIKV/Macaca |
| | mulatta/UGA/MR-766-VEROE6-AC10- |
| | P12_03/1947, complete genome |
| KX879603.1 Zika virus strain | MH130107.1 Zika virus strain ZIKV/Macaca |
| ZIKV/EC/Esmeraldas/062/2016, complete genome | mulatta/UGA/MR-766-VEROE6-AC4-P12_03/1947, |
| | complete genome |
| LC191864.1 Zika virus genomic RNA, complete | MH130106.1 Zika virus strain ZIKV/Macaca |
| genome, strain: ZIKV/Hu/Chiba/S36/2016 | mulatta/UGA/MR-766-VEROE6-AC10- |
| | P12_08/1947, complete genome |
| MH882546.1 Zika virus isolate Zika | MH130104.1 Zika virus strain ZIKV/Macaca |
| virus/H. sapiens-wt/BRA/2016/ZKV19Dsem_2016- | mulatta/UGA/MR-766-VEROE6-AC10- |
| 05-24, complete genome | P12_07/1947, complete genome |
| MH882545.1 Zika virus isolate Zika | MH130102.1 Zika virus strain ZIKV/Macaca |
| virus/H. sapiens-wt/BRA/2016/ZKV19Csem_2016- | mulatta/UGA/MR-766-VEROE6-AC10- |
| 05-19, complete genome | P12_02/1947, complete genome |
| MH882543.1 Zika virus isolate Zika | MH130101.1 Zika virus strain ZIKV/Macaca |
| virus/H. sapiens-wt/BRA/2016/ZKV19Auri_2016- | mulatta/UGA/MR-766-VEROE6-AC4-P12_08/1947, |
| 05-05, complete genome | complete genome |
| MH882548.1 Zika virus isolate Zika | MH130098.1 Zika virus strain ZIKV/Macaca |
| virus/H. sapiens-wt/BRA/2016/ZKV19Fsem_2016- | mulatta/UGA/MR-766-VEROE6-AC10- |
| 06-09, complete genome | P12_01/1947, complete genome |
| KX369547.1 Zika virus strain PF13/251013-18, | MH130095.1 Zika virus strain ZIKV/Macaca |
| complete genome | mulatta/UGA/MR-766-VEROE6-AC4-P12_07/1947, |
| | complete genome |
| MF794971.1 Zika virus strain | MH130094.1 Zika virus strain ZIKV/Macaca |
| ZIKV/EC/Esmeraldas/121/2016, complete genome | mulatta/UGA/MR-766-VEROE6-AC4-P12_05/1947, |
| | complete genome |
| KX811222.1 Zika virus isolate Brazil_2015_MG, | OL414716.1 Zika virus isolate 15555, complete |
| complete genome | genome |
| MH882542.1 Zika virus isolate Zika | MH061911.1 Zika virus strain ZIKV/Macaca |
| virus/H. sapiens-wt/BRA/2016/ZKV17uri_2016-04- | mulatta/UGA/MR-766-VEROE6-GD12- |
| 19, complete genome | P10_06/1947, complete genome |
| MH882541.1 Zika virus isolate Zika | MH061875.1 Zika virus strain ZIKV/Macaca |
| virus/H. sapiens-wt/BRA/2016/ZKV17sem_2016- | mulatta/UGA/MR-766-VEROE6-AC11-P5_03/1947, |
| 04-19, complete genome | complete genome |
| MH882529.1 Zika virus isolate Zika | KX830960.1 Zika virus culture ATCC: VR-84 isolate |
| virus/H. sapiens-wt/BRA/2016/ZKV17Bsem_2016- | MR776, complete genome |
| 05-03, complete genome | |
| MH882528.1 Zika virus isolate Zika | KY989511.1 Zika virus strain MR 766, complete |
| virus/H. sapiens-wt/BRA/2016/ZKV17Auri_2016- | genome |
| 04-26, complete genome | |
| MH882527.1 Zika virus isolate Zika | OK054351.1 Zika virus isolate 211784, complete |
| virus/H. sapiens-wt/BRA/2016/ZKV17Asem_2016- | genome |
| 04-26, complete genome | |
| KU707826.1 Zika virus isolate SSABR1, complete | KY288905.1 Zika virus strain MP1751, complete |
| genome | genome |
| KX253996.1 Zika virus isolate ZKC2/2016, | AY632535.2 Zika virus strain MR 766, complete |
| complete genome | genome |
| KY553111.1 Zika virus isolate AFMC-U, complete | NC_012532.1 Zika virus, complete genome |
| genome | |
| MG674719.1 Zika virus isolate ZKC2P6, complete | KX601169.1 Zika virus strain ZIKV/Macaca |
| genome | mulatta/UGA/MR-766/1947, complete genome |
| MG674718.1 Zika virus isolate ZKC2P4, complete | MW143022.1 Zika virus strain MR766, complete |
| genome | genome |
| MG807647.1 Zika virus isolate SI-BKK06, | KU955595.1 Zika virus isolate Zika virus/A. taylori- |
| complete genome | tc/SEN/1984/41671-DAK, complete genome |
| MG807646.1 Zika virus isolate SI-BKK05, | KU955592.1 Zika virus isolate Zika virus/A. taylori- |
| complete genome | tc/SEN/1984/41662-DAK, complete genome |
| MG548661.1 Zika virus isolate BKK04, complete | KX198134.2 Zika virus strain ZIKV/Aedes |
| genome | africanus/SEN/DAK-AR-41524 A1C1-V2/1984, |
| | complete genome |
| MG548660.1 Zika virus isolate BKK03, complete | KX601166.2 Zika virus strain ZIKV/Aedes |
| genome | africanus/SEN/DakAr41524/1984, complete genome |
| MF996804.1 Zika virus isolate SI-BKK02, | MN025403.1 Zika virus isolate 15555, complete |
| complete genome | genome |
| MH675619.1 Zika virus isolate CTS-30-16p, | KU955591.1 Zika virus isolate Zika |
| complete genome | virus/A. africanus-tc/SEN/1984/41525-DAK. |
| | complete genome |
| MT636065.1 Zika virus isolate ARCB116141, | MG758786.1 Zika virus isolate 41525, complete |
| complete genome | genome |
| KU497555.1 Zika virus isolate Brazil-ZKV2015, | MG758785.1 Zika virus isolate 41525, complete |
| complete genome | genome |
| MH882538.1 Zika virus isolate Zika | MT505350.1 Mutant Zika virus isolate DK23, |
| virus/H. sapiens-wt/BRA/2016/ZKV17Lsem_2016- | complete genome |
| 07-12, complete genome | |
| MH882536.1 Zika virus isolate Zika | MT505349.1 Mutant Zika virus isolate DK, complete |
| virus/H. sapiens-wt/BRA/2016/ZKV17Jsem_2016- | genome |
| 06-28, complete genome | |
| KX266255.1 Zika virus isolate ZIKV_SMGC-1, | MF510857.1 Zika virus isolate Zika virus/Aedes |
| complete genome | taylori/Senegal/1984/DakAr41667, complete genome |
| MH882535.1 Zika virus isolate Zika | KY766069.1 Zika virus isolate Pf13/251013-18, |
| virus/H. sapiens-wt/BRA/2016/ZKV17Hsem_2016- | complete genome |
| 06-16, complete genome | |

TABLE 1H
Non-limiting example Zika 5′ UTR sequences by accession number

KJ776791.2 Zika virus strain H/PF/2013, complete genome
KU681082.3 Zika virus isolate Zika virus/H. sapiens-tc/PHL/2012/CPC-0740, complete genome
KU681081.3 Zika virus isolate Zika virus/H. sapiens-tc/THA/2014/SV0127- 14, complete genome
KU527068.1 Zika virus strain Natal RGN, complete genome
KU853013.1 Zika virus isolate Dominican Republic/2016/PD2, complete genome
KU853012.1 Zika virus isolate Dominican Republic/2016/PD1, complete genome
KU926310.2 Zika virus isolate Rio-S1, complete genome
KU926309.2 Zika virus isolate Rio-U1, complete genome
KU955593.1 Zika virus isolate Zika virus/H. sapiens-tc/KHM/2010/FSS13025, complete genome
KX197192.1 Zika virus isolate ZIKV/H. sapiens/Brazil/PE243/2015, complete genome
KX253996.1 Zika virus isolate ZKC2/2016, complete genome
KX280026.1 Zika virus isolate Paraiba_01, complete genome
KX377337.1 Zika virus strain PRVABC-59, complete genome
KX377336.1 Zika virus strain P6-740, complete genome
KX806557.3 Zika virus isolate TS17-2016, complete genome
KX879604.1 Zika virus strain ZIKV/EC/Esmeraldas/089/2016, complete genome
KX269878.1 Zika virus isolate Haiti/2016/PD, complete genome
KY272987.1 Zika virus isolate SI-BKK01, complete genome
KY272991.1 Zika virus isolate RIO-BMI, complete genome
KY348640.1 Zika virus strain SL1602, complete genome
KY631494.1 Zika virus isolate MEX_ENCB165P4, complete genome
KY415991.1 Zika virus isolate Haiti/0097/2014, complete genome
KY415990.1 Zika virus isolate Haiti/0036/2014, complete genome
KY415989.1 Zika virus isolate Haiti/0074/2014, complete genome
KY415988.1 Zika virus isolate Haiti/0054/2014, complete genome
KY415987.1 Zika virus isolate Haiti/0033/2014, complete genome
KY415986.1 Zika virus isolate Haiti/0029/2014, complete genome
MF384325.1 Zika virus isolate mosquito/Haiti/1682/2016, complete genome
KY553111.1 Zika virus isolate AFMC-U, complete genome
MG674719.1 Zika virus isolate ZKC2P6, complete genome
MG674718.1 Zika virus isolate ZKC2P4, complete genome
MG827392.1 Zika virus strain PF13/251013-18, complete genome
MH158237.1 Zika virus isolate PRVABC59, complete genome
MH158236.1 Zika virus isolate FSS13025, complete genome
MF073359.1 Zika virus isolate 15098, complete genome
MF073358.1 Zika virus isolate 15261, complete genome
MF073357.1 Zika virus isolate 16288, complete genome
MG807646.1 Zika virus isolate SI-BKK05, complete genome
MG548661.1 Zika virus isolate BKK04, complete genome
MG548660.1 Zika virus isolate BKK03, complete genome
MF996804.1 Zika virus isolate SI-BKK02, complete genome
MH544701.2 Zika virus isolate 459148_Meta_Colombia_2016, complete genome
MF783073.1 Zika virus strain Zika virus/mosquito/Haiti/1919/2016, complete genome
MF783072.1 Zika virus strain Zika virus/mosquito/Haiti/1855/2016, complete genome
MH675630.1 Zika virus isolate QTX-04, complete genome
MH675629.1 Zika virus isolate QTX-02, complete genome
MH675628.1 Zika virus isolate CTS-223-16p, complete genome
MH675627.1 Zika virus isolate CTS-193-16p, complete genome
MH675626.1 Zika virus isolate CTS-183-16p, complete genome
MH675625.1 Zika virus isolate CTS-178-16p, complete genome
MH675624.1 Zika virus isolate CTS-61-16p, complete genome
MH675623.1 Zika virus isolate CTS-56-16p, complete genome
MH675622.1 Zika virus isolate CTS-50-16p, complete genome
MH675621.1 Zika virus isolate CTS-47-16p, complete genome
MH675620.1 Zika virus isolate CTS-36-16p, complete genome
MH675619.1 Zika virus isolate CTS-30-16p, complete genome
MN577550.1 Zika virus isolate ZIKV-Nicaragua/2016-UCB7420, complete genome
MN577544.1 Zika virus isolate Haiti/0148/2016, complete genome
MN577543.1 Zika virus isolate Haiti/1327/2014, complete genome
MN566108.1 Zika virus isolate Haiti/0866/2016, complete genome
MN566107.1 Zika virus isolate Haiti/0165/2016, complete genome
MN566106.1 Zika virus isolate Haiti/0395/2016, complete genome
MN566105.1 Zika virus isolate Haiti/0375/2016, complete genome
MN566104.1 Zika virus isolate Haiti/0011/2016, complete genome
MN611472.1 Zika virus isolate 2019YNZIKV02, complete genome
MK566202.1 Zika virus isolate 15098, complete genome
MT507050.1 Zika virus isolate S-542/Yucatan/2017 clone 6A, complete genome
MT507049.1 Zika virus isolate S-542/Yucatan/2017 clone 6V, complete genome
MT507048.1 Zika virus isolate S-542/Yucatan/2017 clone 6C, complete genome
MT507047.1 Zika virus isolate S-542/Yucatan/2017, complete genome
MT636065.1 Zika virus isolate ARCB116141, complete genome
MW015936.1 Zika virus isolate Zika virus/H. sapiens-tc/THA/2006/CVD_06-020, complete genome
OL450366.1 Zika virus isolate ZIKV/Haiti/1332/2015, complete genome
OL450365.1 Zika virus isolate ZIKV/Haiti/0478/2015, complete genome
OL450364.1 Zika virus isolate ZIKV/Haiti/1238/2015, complete genome
NC 035889.1 Zika virus isolate ZIKV/H. sapiens/Brazil/Natal/2015, complete genome
KU501215.1 Zika virus strain PRVABC59, complete genome
KX262887.1 Zika virus isolate 103451, complete genome
KY328289.1 Zika virus isolate HN16, complete genome
KY989971.1 Zika virus isolate FLA, complete genome
MK713748.1 Zika virus isolate PRVABC59, complete genome
OK571913.1 Zika virus isolate Homo sapiens/Haiti/0728/2014, complete genome
KX051561.1 Zika virus isolate SK403/13AS, complete genome
MH882543.1 Zika virus isolate Zika virus/H. sapiens-wt/BRA/2016/ZKV19Auri_2016-05-05, complete
genome
MH882546.1 Zika virus isolate Zika virus/H. sapiens-wt/BRA/2016/ZKV19Dsem_2016-05-24, complete
genome
MH882545.1 Zika virus isolate Zika virus/H. sapiens-wt/BRA/2016/ZKV19Csem_2016-05-19, complete
genome
KX811222.1 Zika virus isolate Brazil_2015_MG, complete genome
KX051560.1 Zika virus isolate SK364/13AS, complete genome
MF352141.1 Zika virus isolate PE243, complete genome
MH900227.1 Zika virus isolate 31N, complete genome
KX601167.1 Zika virus strain ZIKV/Aedes sp./MYS/P6-740/1966, complete genome
KX266255.1 Zika virus isolate ZIKV_SMGC-1, complete genome
KX197205.1 Zika virus isolate 9, complete genome
MH119185.1 Zika virus isolate DMSc05684-16, complete genome
MH882544.1 Zika virus isolate Zika virus/H. sapiens-wt/BRA/2016/ZKV19Bsem_2016-05-12, complete
genome
KU870645.1 Zika virus isolate FB-GWUH-2016, complete genome
KX446950.2 Zika virus strain ZIKV/Aedes. sp/MEX/MEX_2-81/2016, complete genome
KX827268.1 Zika virus strain ZIKV/Homo sapiens/USA/UT-1/2016, complete genome
MH882541.1 Zika virus isolate Zika virus/H. sapiens-wt/BRA/2016/ZKV17sem_2016-04-19, complete
genome
MH882538.1 Zika virus isolate Zika virus/H. sapiens-wt/BRA/2016/ZKV17Lsem_2016-07-12, complete
genome
MH882533.1 Zika virus isolate Zika virus/H. sapiens-wt/BRA/2016/ZKV17Fsem_2016-05-31, complete
genome
MH882531.1 Zika virus isolate Zika virus/H. sapiens-wt/BRA/2016/ZKV17Dsem_2016-05-17, complete
genome
MH882527.1 Zika virus isolate Zika virus/H. sapiens-wt/BRA/2016/ZKV17Asem_2016-04-26, complete
genome
MN100039.1 Zika virus isolate ZIKV/Homo sapiens/PAN/CDC-259249_V1-V3/2015, complete genome
KU497555.1 Zika virus isolate Brazil-ZKV2015, complete genome
KU761561.1 Zika virus isolate ZJ02, complete genome
KU761560.1 Zika virus isolate ZJ03, complete genome
MG770188.1 Zika virus isolate SV0127-14, complete genome
MG770187.1 Zika virus isolate SV0127-14, complete genome
MH882548.1 Zika virus isolate Zika virus/H. sapiens-wt/BRA/2016/ZKV19Fsem_2016-06-09, complete
genome
MH882547.1 Zika virus isolate Zika virus/H. sapiens-wt/BRA/2016/ZKV19Esem_2016-06-02, complete
genome
MH882542.1 Zika virus isolate Zika virus/H. sapiens-wt/BRA/2016/ZKV17uri_2016-04-19, complete
genome
MH882540.1 Zika virus isolate Zika virus/H. sapiens-wt/BRA/2016/ZKV17Nsem_2016-07-27, complete
genome
MH882539.1 Zika virus isolate Zika virus/H. sapiens-wt/BRA/2016/ZKV17Msem_2016-07-19, complete
genome
MH882536.1 Zika virus isolate Zika virus/H. sapiens-wt/BRA/2016/ZKV17Jsem_2016-06-28, complete
genome
MH882535.1 Zika virus isolate Zika virus/H. sapiens-wt/BRA/2016/ZKV17Hsem_2016-06-16, complete
genome
MH882534.1 Zika virus isolate Zika virus/H. sapiens-wt/BRA/2016/ZKV17Gsem_2016-06-08, complete
genome
MH882532.1 Zika virus isolate Zika virus/H. sapiens-wt/BRA/2016/ZKV17Esem_2016-05-24, complete
genome
MH882530.1 Zika virus isolate Zika virus/H. sapiens-wt/BRA/2016/ZKV17Csem_2016-05-10, complete
genome
MH882529.1 Zika virus isolate Zika virus/H. sapiens-wt/BRA/2016/ZKV17Bsem_2016-05-03, complete
genome
MH882528.1 Zika virus isolate Zika virus/H. sapiens-wt/BRA/2016/ZKV17Auri_2016-04-26, complete
genome
MN124091.1 Zika virus isolate ZIKV/Homo sapiens/PAN/CDC-259249_V1-V3/2015, complete genome
MN124090.1 Zika virus isolate ZIKV/Homo sapiens/PAN/CDC-259249_V1-V3/2015, complete genome
MN101548.1 Zika virus isolate Salvador, complete genome
MT377494.1 Zika virus isolate MU-DMSC-3/2017, complete genome
KX766028.1 Zika virus isolate R114916, complete genome
KX673530.1 Zika virus isolate PHE_semen_Guadeloupe, complete genome
MH013290.1 Zika virus isolate BKK07, complete genome
MT377502.1 Zika virus isolate NS-274/2006, complete genome
KX087102.2 Zika virus strain ZIKV/Homo sapiens/COL/FLR/2015, complete genome
KX446951.2 Zika virus strain ZIKV/Aedes. sp/MEX/MEX_I-7/2016, complete genome
KX856011.1 Zika virus strain ZIKV/Aedes sp./MEX_I-44/2016, complete genome
KY120348.1 Zika virus strain MEX_CIENI551P4, complete genome
KY631493.1 Zika virus isolate MEX_ENCB165, complete genome
KX601168.1 Zika virus strain ZIKV/Homo Sapiens/PRI/PRVABC59/2015, complete genome
LC190723.1 Zika virus genomic RNA, complete genome, strain: ZIKV/Hu/Yokohama/1/2016
KY765327.1 Zika virus strain ZIKV/Homo sapiens/NIC/5005_13A1_SP/2016, complete genome
KY765325.1 Zika virus strain ZIKV/Homo sapiens/NIC/5005_13A1/2016, complete genome
KY765324.1 Zika virus strain ZIKV/Homo sapiens/NIC/8610_13A1/2016, complete genome
KY765320.1 Zika virus strain ZIKV/Homo sapiens/NIC/6406_13A1_SP/2016, complete genome
MH157208.1 Zika virus strain ZIKV/Homo sapiens/MEX/41-022-F_V0_O/2016, complete genome
MH157202.1 Zika virus strain ZIKV/Homo sapiens/MEX/41-017-F_V3_O/2016, complete genome
KY765318.1 Zika virus strain ZIKV/Homo sapiens/NIC/4886_12A1/2016, complete genome
MH916806.1 Zika virus strain ZIKV/Homo sapiens/PRI/PRVABC59_8/2015, complete genome
MH916802.1 Zika virus strain ZIKV/Homo sapiens/PRI/PRVABC59_17/2015, complete genome
LC219720.1 Zika virus genomic RNA, complete genome, strain: ZIKV/Hu/NIID123/2016
KY120349.2 Zika virus strain MEX_CIENI551, complete genome
MH513599.1 Zika virus isolate BR/Sinop/H366/2015, complete genome
MH513598.1 Zika virus isolate BR/Sinop/H355/2015, complete genome
KX087101.3 Zika virus strain ZIKV/Homo sapiens/PRI/PRVABC59/2015, complete genome
MK241417.1 Zika virus isolate ZIKV/Homo_sapiens/CPV/2016/CV907u, complete genome
MK241416.1 Zika virus isolate ZIKV/Homo_sapiens/CPV/2015/CV487, complete genome
MK241415.1 Zika virus isolate ZIKV/Homo_sapiens/CPV/2015/CV448c, complete genome
KX198135.2 Zika virus strain ZIKV/Homo sapiens/PAN/BEI-259634_V4/2016, complete genome
KX694532.2 Zika virus strain ZIKV/Homo sapiens/THA/PLCal_ZV/2013, complete genome
KY648934.1 Zika virus strain ZIKV/Aedes aegypti/MEX/MEX_I-44/2016, complete genome
MH916803.1 Zika virus strain ZIKV/Homo sapiens/PRI/PRVABC59_1/2015, complete genome
KX694534.2 Zika virus strain ZIKV/Homo sapiens/HND/R103451/2015, complete genome
MZ008356.1 Zika virus isolate ZIKV/Homo_sapiens/Cambodia/2019/SZ1901, complete genome
LC369584.1 Zika virus ZIKV/Hu/Thai/KngSG/17-D501 genomic RNA, nearly complete genome
KU922960.1 Zika virus isolate MEX/InDRE/Sm/2016, complete genome
KU922923.1 Zika virus isolate MEX/InDRE/Lm/2016, complete genome
MT377503.1 Zika virus isolate 15-1144, complete genome
MT377500.1 Zika virus isolate MU-DMSC-6/2016, complete genome
MT377499.1 Zika virus isolate MU-DMSC-5/2016, complete genome
MT377493.1 Zika virus isolate MU-DMSC-2/2017, complete genome
MT377492.1 Zika virus isolate MU-DMSC-1/2016, complete genome
MT377497.1 Zika virus isolate MU-DMSC-3/2016, complete genome
MT377496.1 Zika virus isolate MU-DMSC-2/2016, complete genome
MT377495.1 Zika virus isolate MU-DMSC-4/2017, complete genome
MT377498.1 Zika virus isolate MU-DMSC-4/2016, complete genome
MT377491.1 Zika virus isolate MU-DMSC-1/2017, complete genome
MT377504.1 Zika virus isolate NS-110/2006, complete genome
KX879603.1 Zika virus strain ZIKV/EC/Esmeraldas/062/2016, complete genome
LC191864.1 Zika virus genomic RNA, complete genome, strain: ZIKV/Hu/Chiba/S36/2016
MF794971.1 Zika virus strain ZIKV/EC/Esmeraldas/121/2016, complete genome
MG807647.1 Zika virus isolate SI-BKK06, complete genome
KX766029.1 Zika virus isolate R116265, complete genome
KX051563.1 Zika virus isolate Haiti/1/2016, complete genome
KX247646.1 Zika virus isolate Zika virus/Homo sapiens/COL/UF-1/2016, complete genome
KX702400.1 Zika virus strain Zika virus/Homo sapiens/VEN/UF-1/2016, complete genome
KX893855.1 Zika virus strain Zika virus/Homo sapiens/VEN/UF-2/2016, complete genome
KY765317.1 Zika virus strain ZIKV/Homo sapiens/NIC/7252_12A1/2016, complete genome
KX369547.1 Zika virus strain PF13/251013-18, complete genome
MH513600.1 Zika virus isolate BR/Sinop/H366 2P/2015, complete genome
KX694533.2 Zika virus strain ZIKV/Aedes aegypti/MYS/P6-740/1966, complete genome
KU707826.1 Zika virus isolate SSABRI, complete genome
KY765323.1 Zika virus strain ZIKV/Homo sapiens/NIC/6188_13A1/2016, complete genome
KY765321.1 Zika virus strain ZIKV/Homo sapiens/NIC/4886_12A1_SP/2016, complete genome
KY765326.1 Zika virus strain ZIKV/Homo sapiens/NIC/6188_13A1_SP/2016, complete genome
KY765322.1 Zika virus strain ZIKV/Homo sapiens/NIC/7252_12A1_SP/2016, complete genome
KX156776.2 Zika virus strain ZIKV/Homo sapiens/PAN/CDC-259364_V1-V2/2015, complete genome
KX156775.2 Zika virus strain ZIKV/Homo sapiens/PAN/CDC-259249_V1-V3/2015, complete genome
KU820899.2 Zika virus isolate ZJ03, complete genome
KX117076.1 Zika virus isolate Zhejiang04, complete genome
KX051562.1 Zika virus isolate SV0010/15, complete genome
KY766069.1 Zika virus isolate Pf13/251013-18, complete genome
KU321639.1 Zika virus strain ZikaSPH2015, complete genome
KU509998.3 Zika virus strain Haiti/1225/2014, complete genome
KU744693.1 Zika virus isolate VE_Ganxian, complete genome
MT483911.1 Zika virus isolate 800/16, complete genome
MH157213.1 Zika virus strain ZIKV/Homo sapiens/MEX/41-001-F_V3_O/2016, complete genome
MT377501.1 Zika virus isolate MU-DMSC-5/2017, complete genome
MH061869.1 Zika virus strain ZIKV/Macaca mulatta/UGA/MR-766-VEROE6-AA1-P8_06/1947, complete
genome
MH061867.1 Zika virus strain ZIKV/Macaca mulatta/UGA/MR-766-VEROE6-GA3-P10_04/1947,
complete genome
MH061858.1 Zika virus strain ZIKV/Macaca mulatta/UGA/MR-766-VEROE6-FC11-P7_05/1947, complete
genome
OK054351.1 Zika virus isolate 211784, complete genome
KU955595.1 Zika virus isolate Zika virus/A. taylori-tc/SEN/1984/41671-DAK, complete genome
KU955592.1 Zika virus isolate Zika virus/A. taylori-tc/SEN/1984/41662-DAK, complete genome
KU955591.1 Zika virus isolate Zika virus/A. africanus-tc/SEN/1984/41525-DAK, complete genome
MG758786.1 Zika virus isolate 41525, complete genome
MG758785.1 Zika virus isolate 41525, complete genome
MT505350.1 Mutant Zika virus isolate DK23, complete genome
MT505349.1 Mutant Zika virus isolate DK, complete genome
KY288905.1 Zika virus strain MP1751, complete genome
MF510857.1 Zika virus isolate Zika virus/Aedes taylori/Senegal/1984/DakAr41667, complete genome
OL414716.1 Zika virus isolate 15555, complete genome
MW143022.1 Zika virus strain MR766, complete genome
KX156774.2 Zika virus strain ZIKV/Homo sapiens/PAN/CDC-259359_V1-V3/2015, complete genome
MH061868.1 Zika virus strain ZIKV/Macaca mulatta/UGA/MR-766-VEROE6-AA1-P8_07/1947, complete
genome
MN025403.1 Zika virus isolate 15555, complete genome
MH061906.1 Zika virus strain ZIKV/Macaca mulatta/UGA/MR-766-VEROE6-FC11-P7_01/1947, complete
genome
MH061878.1 Zika virus strain ZIKV/Macaca mulatta/UGA/MR-766-VEROE6-FC3-P8_05/1947, complete
genome
MH061891.1 Zika virus strain ZIKV/Macaca mulatta/UGA/MR-766-VEROE6-FA12-P7_06/1947,
complete genome
MH061877.1 Zika virus strain ZIKV/Macaca mulatta/UGA/MR-766-VEROE6-FC11-P7_07/1947, complete
genome
MH061860.1 Zika virus strain ZIKV/Macaca mulatta/UGA/MR-766-VEROE6-FC11-P7_06/1947, complete
genome
MH061904.1 Zika virus strain ZIKV/Macaca mulatta/UGA/MR-766-VEROE6-FC3-P8_02/1947, complete
genome
MH061886.1 Zika virus strain ZIKV/Macaca mulatta/UGA/MR-766-VEROE6-FA12-P7_05/1947,
complete genome
MH061859.1 Zika virus strain ZIKV/Macaca mulatta/UGA/MR-766-VEROE6-AC11-P5_01/1947,
complete genome
MH061894.1 Zika virus strain ZIKV/Macaca mulatta/UGA/MR-766-VEROE6-FC11-P7_03/1947, complete
genome
KX601166.2 Zika virus strain ZIKV/Aedes africanus/SEN/DakAr41524/1984, complete genome
KX198134.2 Zika virus strain ZIKV/Aedes africanus/SEN/DAK-AR-41524_A1C1-V2/1984, complete
genome
MH061881.1 Zika virus strain ZIKV/Macaca mulatta/UGA/MR-766-VEROE6-GD12-P10_02/1947,
complete genome
MH061913.1 Zika virus strain ZIKV/Macaca mulatta/UGA/MR-766-VEROE6-GA3-P10_05/1947,
complete genome
AY632535.2 Zika virus strain MR 766, complete genome
LC002520.1 Zika virus genomic RNA, complete genome, strain: MR766-NIID
KU955594.1 Zika virus isolate Zika virus/M. mulatta-tc/UGA/1947/MR-766, complete genome
KX377335.1 Zika virus strain MR-766, complete genome
KX830960.1 Zika virus culture ATCC: VR-84 isolate MR776, complete genome
KY989511.1 Zika virus strain MR 766, complete genome
NC 012532.1 Zika virus, complete genome
MH061905.1 Zika virus strain ZIKV/Macaca mulatta/UGA/MR-766-VEROE6-AA1-P8_01/1947, complete
genome
MH061903.1 Zika virus strain ZIKV/Macaca mulatta/UGA/MR-766-VEROE6-AA1-P8_04/1947, complete
genome
MH061901.1 Zika virus strain ZIKV/Macaca mulatta/UGA/MR-766-VEROE6-GA3-P10_07/1947,
complete genome
MH061893.1 Zika virus strain ZIKV/Macaca mulatta/UGA/MR-766-VEROE6-GD12-P10_03/1947,
complete genome
MH061884.1 Zika virus strain ZIKV/Macaca mulatta/UGA/MR-766-VEROE6-GA3-P10_01/1947,
complete genome
MH061882.1 Zika virus strain ZIKV/Macaca mulatta/UGA/MR-766-VEROE6-GD12-P10_08/1947,
complete genome
MH061879.1 Zika virus strain ZIKV/Macaca mulatta/UGA/MR-766-VEROE6-GD12-P10_05/1947,
complete genome
MH061874.1 Zika virus strain ZIKV/Macaca mulatta/UGA/MR-766-VEROE6-AA1-P8_03/1947, complete
genome
MH061865.1 Zika virus strain ZIKV/Macaca mulatta/UGA/MR-766-VEROE6-AA1-P8_02/1947, complete
genome
MH061863.1 Zika virus strain ZIKV/Macaca mulatta/UGA/MR-766-VEROE6-FA12-P7_02/1947,
complete genome
MH061915.1 Zika virus strain ZIKV/Macaca mulatta/UGA/MR-766-VEROE6-P12_02/1947, complete
genome
MH061911.1 Zika virus strain ZIKV/Macaca mulatta/UGA/MR-766-VEROE6-GD12-P10_06/1947,
complete genome
MH061909.1 Zika virus strain ZIKV/Macaca mulatta/UGA/MR-766-VEROE6-AC11-P5_04/1947,
complete genome
MH061908.1 Zika virus strain ZIKV/Macaca mulatta/UGA/MR-766-VEROE6-P12_06/1947, complete
genome
MH061902.1 Zika virus strain ZIKV/Macaca mulatta/UGA/MR-766-VEROE6-FA12-P7_08/1947,
complete genome
MH061900.1 Zika virus strain ZIKV/Macaca mulatta/UGA/MR-766-VEROE6-P12_04/1947, complete
genome
MH061897.1 Zika virus strain ZIKV/Macaca mulatta/UGA/MR-766-VEROE6-FC3-P8_01/1947, complete
genome
MH061895.1 Zika virus strain ZIKV/Macaca mulatta/UGA/MR-766-VEROE6-P12_01/1947, complete
genome
MH061892.1 Zika virus strain ZIKV/Macaca mulatta/UGA/MR-766-VEROE6-P12_03/1947, complete
genome
MH061890.1 Zika virus strain ZIKV/Macaca mulatta/UGA/MR-766-VEROE6-FC3-P8_08/1947, complete
genome
MH061889.1 Zika virus strain ZIKV/Macaca mulatta/UGA/MR-766-VEROE6-FC3-P8_07/1947, complete
genome
MH061888.1 Zika virus strain ZIKV/Macaca mulatta/UGA/MR-766-VEROE6-AC11-P5_02/1947,
complete genome
MH061880.1 Zika virus strain ZIKV/Macaca mulatta/UGA/MR-766-VEROE6-P12_08/1947, complete
genome
MH061875.1 Zika virus strain ZIKV/Macaca mulatta/UGA/MR-766-VEROE6-AC11-P5_03/1947,
complete genome
MH061873.1 Zika virus strain ZIKV/Macaca mulatta/UGA/MR-766-VEROE6-FA12-P7_01/1947,
complete genome
MH061870.1 Zika virus strain ZIKV/Macaca mulatta/UGA/MR-766-VEROE6-AC11-P5_05/1947,
complete genome
MH061862.1 Zika virus strain ZIKV/Macaca mulatta/UGA/MR-766-VEROE6-GD12-P10_01/1947,
complete genome
MH061857.1 Zika virus strain ZIKV/Macaca mulatta/UGA/MR-766-VEROE6-AC11-P5_07/1947,
complete genome
MH061855.1 Zika virus strain ZIKV/Macaca mulatta/UGA/MR-766-VEROE6-FA12-P7_03/1947,
complete genome
MH061852.1 Zika virus strain ZIKV/Macaca mulatta/UGA/MR-766-VEROE6-AC11-P5_08/1947,
complete genome
MH061856.1 Zika virus strain ZIKV/Macaca mulatta/UGA/MR-766-VEROE6-FC3-P8_03/1947, complete
genome
MH130096.1 Zika virus strain ZIKV/Macaca mulatta/UGA/MR-766-VEROE6-AC10-P12_05/1947,
complete genome
MH061914.1 Zika virus strain ZIKV/Macaca mulatta/UGA/MR-766-VEROE6-GA3-P10_02/1947,
complete genome
MH061898.1 Zika virus strain ZIKV/Macaca mulatta/UGA/MR-766-VEROE6-FC11-P7_02/1947, complete
genome
MH061899.1 Zika virus strain ZIKV/Macaca mulatta/UGA/MR-766-VEROE6-AA1-P8_08/1947, complete
genome
MH061871.1 Zika virus strain ZIKV/Macaca mulatta/UGA/MR-766-VEROE6-FC11-P7_04/1947, complete
genome
MK105975.1 Zika virus strain MR766, complete genome
MW680970.1 Zika virus isolate rGZ02p/2018, complete genome
MW680969.1 Zika virus isolate rGZ02a/2018, complete genome
MH061887.1 Zika virus strain ZIKV/Macaca mulatta/UGA/MR-766-VEROE6-P12_05/1947, complete
genome
MH061872.1 Zika virus strain ZIKV/Macaca mulatta/UGA/MR-766-VEROE6-AA1-P8_05/1947, complete
genome
MH061866.1 Zika virus strain ZIKV/Macaca mulatta/UGA/MR-766-VEROE6-GD12-P10_07/1947,
complete genome
MH061861.1 Zika virus strain ZIKV/Macaca mulatta/UGA/MR-766-VEROE6-GA3-P10_08/1947,
complete genome
MH061910.1 Zika virus strain ZIKV/Macaca mulatta/UGA/MR-766-VEROE6-FA12-P7_04/1947,
complete genome
MH130102.1 Zika virus strain ZIKV/Macaca mulatta/UGA/MR-766-VEROE6-AC10-P12_02/1947,
complete genome
MH061876.1 Zika virus strain ZIKV/Macaca mulatta/UGA/MR-766-VEROE6-P12_07/1947, complete
genome
MH061854.1 Zika virus strain ZIKV/Macaca mulatta/UGA/MR-766-VEROE6-AC11-P5_06/1947,
complete genome
MH061907.1 Zika virus strain ZIKV/Macaca mulatta/UGA/MR-766-VEROE6-GA3-P10_06/1947,
complete genome
MH130109.1 Zika virus strain ZIKV/Macaca mulatta/UGA/MR-766-VEROE6-AC4-P12_06/1947,
complete genome
MH061853.1 Zika virus strain ZIKV/Macaca mulatta/UGA/MR-766-VEROE6-GD12-P10_04/1947,
complete genome
KX601169.1 Zika virus strain ZIKV/Macaca mulatta/UGA/MR-766/1947, complete genome
MH061864.1 Zika virus strain ZIKV/Macaca mulatta/UGA/MR-766-VEROE6-FA12-P7_07/1947,
complete genome
MH130094.1 Zika virus strain ZIKV/Macaca mulatta/UGA/MR-766-VEROE6-AC4-P12_05/1947,
complete genome
MH061912.1 Zika virus strain ZIKV/Macaca mulatta/UGA/MR-766-VEROE6-GA3-P10_03/1947,
complete genome
MH061896.1 Zika virus strain ZIKV/Macaca mulatta/UGA/MR-766-VEROE6-FC3-P8_04/1947, complete
genome
MH061885.1 Zika virus strain ZIKV/Macaca mulatta/UGA/MR-766-VEROE6-FC3-P8_06/1947, complete
genome
MH130108.1 Zika virus strain ZIKV/Macaca mulatta/UGA/MR-766-VEROE6-AC4-P12_04/1947,
complete genome
MH130107.1 Zika virus strain ZIKV/Macaca mulatta/UGA/MR-766-VEROE6-AC4-P12_03/1947,
complete genome
MH130106.1 Zika virus strain ZIKV/Macaca mulatta/UGA/MR-766-VEROE6-AC10-P12_08/1947,
complete genome
MH130105.1 Zika virus strain ZIKV/Macaca mulatta/UGA/MR-766-VEROE6-AC10-P12_04/1947,
complete genome
MH130103.1 Zika virus strain ZIKV/Macaca mulatta/UGA/MR-766-VEROE6-AC10-P12_06/1947,
complete genome
MH130101.1 Zika virus strain ZIKV/Macaca mulatta/UGA/MR-766-VEROE6-AC4-P12_08/1947,
complete genome
MH130100.1 Zika virus strain ZIKV/Macaca mulatta/UGA/MR-766-VEROE6-AC4-P12_01/1947,
complete genome
MH130099.1 Zika virus strain ZIKV/Macaca mulatta/UGA/MR-766-VEROE6-AC4-P12_02/1947,
complete genome
MH130098.1 Zika virus strain ZIKV/Macaca mulatta/UGA/MR-766-VEROE6-AC10-P12_01/1947,
complete genome
MH130097.1 Zika virus strain ZIKV/Macaca mulatta/UGA/MR-766-VEROE6-AC10-P12_03/1947,
complete genome
MH130095.1 Zika virus strain ZIKV/Macaca mulatta/UGA/MR-766-VEROE6-AC4-P12_07/1947,
complete genome
MH061883.1 Zika virus strain ZIKV/Macaca mulatta/UGA/MR-766-VEROE6-FC11-P7_08/1947, complete
genome
MH130104.1 Zika virus strain ZIKV/Macaca mulatta/UGA/MR-766-VEROE6-AC10-P12_07/1947,
complete genome

TABLE 1I
Non-limiting example Zika capsid (C) sequences by accession number

| | |
|---|---|
| ASB32509.1 capsid protein C | AVC63698.1 Flavivirus capsid protein C |
| ALU33341.1 capsid | AVC63697.1 Flavivirus capsid protein C |
| AMQ48982.1 anchored capsid protein C | QOF88708.1 Flavivirus capsid protein C |
| AMQ48981.1 anchored capsid protein C | QKF93441.1 Flavivirus capsid protein C |
| ANC90426.1 capsid | QKF93440.1 Flavivirus capsid protein C |
| APH11492.1 anchored capsid protein C | QKF93439.1 Flavivirus capsid protein C |
| AXF50016.1 capsid | QKF93435.1 Flavivirus capsid protein C |
| AXF50015.1 capsid | QKF93430.1 Flavivirus capsid protein C |
| AXF50014.1 capsid | AMM39806.1 Flavivirus capsid protein C |
| AXQ40007.1 anchored capsid protein C | AMQ34004.1 Flavivirus capsid protein C |
| AXQ40006.1 anchored capsid protein C | AMQ34003.1 Flavivirus capsid protein C |
| QGA67054.1 anchored capsid protein C | ANA12599.1 Flavivirus capsid protein C |
| QGA67053.1 anchored capsid protein C | ANB66183.1 Flavivirus capsid protein C |
| QGA67052.1 anchored capsid protein C | ANB66182.1 Flavivirus capsid protein C |
| QGA67051.1 anchored capsid protein C | ANC90428.1 Flavivirus capsid protein C |
| QGA67050.1 anchored capsid protein C | ANF16414.1 Flavivirus capsid protein C |
| QGA72951.1 anchored capsid protein C | AMM43326.1 Flavivirus capsid protein C |
| QBM11757.1 capsid | ARM59239.1 Flavivirus capsid protein C |
| QKM77299.1 anchored capsid protein C | AUI42330.1 Flavivirus capsid protein C |
| QKM77298.1 anchored capsid protein C | AUI42329.1 Flavivirus capsid protein C |
| QKU35968.1 anchored capsid protein C | AXF50052.1 Flavivirus capsid protein C |
| QKX95861.1 capsid protein C | QDZ58856.1 Flavivirus capsid protein C |
| QTA38994.1 anchored capsid protein C | QDZ58855.1 Flavivirus capsid protein C |
| QTA38993.1 anchored capsid protein C | QDZ58854.1 Flavivirus capsid protein C |
| QKF93438.1 anchored capsid protein C | QGA67056.1 Flavivirus capsid protein C |
| QKF93437.1 anchored capsid protein C | QGA67055.1 Flavivirus capsid protein C |
| QKF93436.1 anchored capsid protein C | UED15620.1 Flavivirus capsid protein C |
| QKF93434.1 anchored capsid protein C | AMC13911.1 Flavivirus capsid protein C |
| QKF93433.1 anchored capsid protein C | ANK57897.1 Flavivirus capsid protein C |
| QKF93432.1 anchored capsid protein C | ANW07476.1 Flavivirus capsid protein C |
| QKF93431.1 anchored capsid protein C | AWH65849.1 Flavivirus capsid protein C |
| QKF93429.1 anchored capsid protein C | AYI50275.1 Flavivirus capsid protein C |
| QKF93428.1 anchored capsid protein C | AYI50274.1 Flavivirus capsid protein C |
| UHI99867.1 anchored capsid protein C | AYI50273.1 Flavivirus capsid protein C |
| UHI99866.1 anchored capsid protein C | QCG74166.1 Flavivirus capsid protein C |
| UHI99865.1 anchored capsid protein C | AXQ40005.1 Flavivirus capsid protein C |
| YP 009428568.1 anchored capsid protein C | AXQ40004.1 Flavivirus capsid protein C |
| YP_009430295.1 anchored capsid protein C | AXQ40003.1 Flavivirus capsid protein C |
| AHZ13508.1 Flavivirus capsid protein C | AXQ40002.1 Flavivirus capsid protein C |
| ALU33341.1 Flavivirus capsid protein C | AXQ40001.1 Flavivirus capsid protein C |
| AMB37295.1 Flavivirus capsid protein C | AXQ40000.1 Flavivirus capsid protein C |
| AMD61711.1 Flavivirus capsid protein C | AXQ39999.1 Flavivirus capsid protein C |
| AMB18850.1 Flavivirus capsid protein C | AXQ39998.1 Flavivirus capsid protein C |
| AMH87239.1 Flavivirus capsid protein C | AXQ39997.1 Flavivirus capsid protein C |
| AMD16557.1 Flavivirus capsid protein C | AXQ39996.1 Flavivirus capsid protein C |
| AMN14620.1 Flavivirus capsid protein C | QKM77301.1 Flavivirus capsid protein C |
| AMN14619.1 Flavivirus capsid protein C | QKM77300. 1 Flavivirus capsid protein C |
| AMQ48982.1 Flavivirus capsid protein C | AWF93618.1 Flavivirus capsid protein C |
| AMQ48981.1 Flavivirus capsid protein C | QFZ95661.1 Flavivirus capsid protein C |
| AMQ48986.1 Flavivirus capsid protein C | ANW07476.1 capsid protein C |
| AMX81919.1 Flavivirus capsid protein C | AYI50275.1 capsid protein C |
| ANG09399.1 Flavivirus capsid protein C | AYI50274.1 capsid protein C |
| ANH10698.1 Flavivirus capsid protein C | AYI50273.1 capsid protein C |
| ANN44857.1 Flavivirus capsid protein C | AXQ40005.1 capsid protein C |
| ANZ46736.1 Flavivirus capsid protein C | AXQ40004.1 capsid protein C |
| AOG18296.1 Flavivirus capsid protein C | AXQ40003.1 capsid protein C |
| AND01116.2 Flavivirus capsid protein C | AXQ40002.1 capsid protein C |
| AOR82893.1 Flavivirus capsid protein C | AXQ40001.1 capsid protein C |
| AOR82892.1 Flavivirus capsid protein C | AXQ40000.1 capsid protein C |
| BAV82373.1 Flavivirus capsid protein C | AXQ39999.1 capsid protein C |
| ANH22038.1 Flavivirus capsid protein C | AXQ39998.1 capsid protein C |
| APC60216.2 Flavivirus capsid protein C | AXQ39997.1 capsid protein C |
| APO08503. 1 Flavivirus capsid protein C | AXQ39996.1 capsid protein C |
| APH11492.1 Flavivirus capsid protein C | QKM77301.1 capsid protein C |
| APO36913. 1 Flavivirus capsid protein C | QKM77300.1 capsid protein C |
| AOO19564.1 Flavivirus capsid protein C | AWF93618.1 capsid protein C |
| AQV07165.1 Flavivirus capsid protein C | UBI73854.1 anchored capsid protein C |
| BAX00477.1 Flavivirus capsid protein C | AMX81915.1 Flavivirus capsid protein C |
| AQW43708.1 Flavivirus capsid protein C | UBI73854.1 Flavivirus capsid protein C |
| AQW43707.1 Flavivirus capsid protein C | AMM43325.1 Flavivirus capsid protein C |
| AQZ41956.1 Flavivirus capsid protein C | ANC90427.1 capsid protein C |
| AQZ41955.1 Flavivirus capsid protein C | ANW07477.1 capsid protein C |
| AQZ41954.1 Flavivirus capsid protein C | ANW07474.2 capsid protein C |
| AQZ41953.1 Flavivirus capsid protein C | AVW85863.1 capsid protein C |
| AQZ41952.1 Flavivirus capsid protein C | AVW85862.1 capsid protein C |
| AQZ41951.1 Flavivirus capsid protein C | AVW85861.1 capsid protein C |
| AQZ41950.1 Flavivirus capsid protein C | AVW85860.1 capsid protein C |
| AQZ41949.1 Flavivirus capsid protein C | AVW85859.1 capsid protein C |
| AQZ41948.1 Flavivirus capsid protein C | AVW85858.1 capsid protein C |
| AQZ41947.1 Flavivirus capsid protein C | AVW85857.1 capsid protein C |
| APW84877.1 Flavivirus capsid protein C | AVW85856.1 capsid protein C |
| APW84876.1 Flavivirus capsid protein C | AVW85855.1 capsid protein C |
| APW84875.1 Flavivirus capsid protein C | AVW85854.1 capsid protein C |
| APW84874.1 Flavivirus capsid protein C | AVW85853.1 capsid protein C |
| APW84873.1 Flavivirus capsid protein C | AVW85852.1 capsid protein C |
| APW84872.1 Flavivirus capsid protein C | AVW85851.1 capsid protein C |
| ASB32509.1 Flavivirus capsid protein C | AVW85850.1 capsid protein C |
| ASF57880.1 Flavivirus capsid protein C | AVW85849.1 capsid protein C |
| AQS26698.1 Flavivirus capsid protein C | AVW85848.1 capsid protein C |
| ATB53752.1 Flavivirus capsid protein C | AVW85847.1 capsid protein C |
| ARB08102.1 Flavivirus capsid protein C | AVW85846.1 capsid protein C |
| AVG19275.1 Flavivirus capsid protein C | AVW85845.1 capsid protein C |
| BBC70847.1 Flavivirus capsid protein C | AVW85844.1 capsid protein C |
| AWF93619.1 Flavivirus capsid protein C | AVW85843.1 capsid protein C |
| AWF93617.1 Flavivirus capsid protein C | AVW85842.1 capsid protein C |
| ARU07076.1 Flavivirus capsid protein C | AVW85841.1 capsid protein C |
| ARU07075.1 Flavivirus capsid protein C | AVW85840.1 capsid protein C |
| ARU07074.1 Flavivirus capsid protein C | AVW85839.1 capsid protein C |
| AVV62004.1 Flavivirus capsid protein C | AVW85838.1 capsid protein C |
| AVG19203.1 Flavivirus capsid protein C | AVW85837.1 capsid protein C |
| AVG19202.1 Flavivirus capsid protein C | AVW85836.1 capsid protein C |
| AUF35022.1 Flavivirus capsid protein C | AVW85835.1 capsid protein C |
| AUF35021.1 Flavivirus capsid protein C | AVW85834.1 capsid protein C |
| ATL14618.1 Flavivirus capsid protein C | AVW85833.1 capsid protein C |
| AXF50016.1 Flavivirus capsid protein C | AVW85832.1 capsid protein C |
| AXF50015.1 Flavivirus capsid protein C | AVW85831.1 capsid protein C |
| AXF50014.1 Flavivirus capsid protein C | AVW85830.1 capsid protein C |
| ATB53754.1 Flavivirus capsid protein C | AVW85829.1 capsid protein C |
| ATB53753.1 Flavivirus capsid protein C | AVW85828.1 capsid protein C |
| AYV74937.1 Flavivirus capsid protein C | AVW85827.1 capsid protein C |
| AYV74936.1 Flavivirus capsid protein C | AVW85826.1 capsid protein C |
| AYV74935.1 Flavivirus capsid protein C | AVW85825.1 capsid protein C |
| AYV74934.1 Flavivirus capsid protein C | AVW85824.1 capsid protein C |
| AYV74933.1 Flavivirus capsid protein C | AVW85823.1 capsid protein C |
| AYV74932.1 Flavivirus capsid protein C | AVW85822.1 capsid protein C |
| AYV74931.1 Flavivirus capsid protein C | AVW85821.1 capsid protein C |
| AYV74930.1 Flavivirus capsid protein C | AVW85820.1 capsid protein C |
| AYV74929.1 Flavivirus capsid protein C | AVW85819.1 capsid protein C |
| AYV74928.1 Flavivirus capsid protein C | AVW85818.1 capsid protein C |
| AYV74927.1 Flavivirus capsid protein C | AVW85817.1 capsid protein C |
| AYV74925.1 Flavivirus capsid protein C | AVW85816.1 capsid protein C |
| AYV74924.1 Flavivirus capsid protein C | AVW85815.1 capsid protein C |
| AYV74923.1 Flavivirus capsid protein C | AVW85814.1 capsid protein C |
| AYV74922.1 Flavivirus capsid protein C | AVW85813.1 capsid protein C |
| AYV74921.1 Flavivirus capsid protein C | AVW85812.1 capsid protein C |
| AYV74920.1 Flavivirus capsid protein C | AVW85811.1 capsid protein C |
| AYV74919.1 Flavivirus capsid protein C | AVW85810.1 capsid protein C |
| AYV74918.1 Flavivirus capsid protein C | AVW85809.1 capsid protein C |
| AYV74917.1 Flavivirus capsid protein C | AVW85808.1 capsid protein C |
| AYV74916.1 Flavivirus capsid protein C | AVW85807.1 capsid protein C |
| AXQ40007.1 Flavivirus capsid protein C | AVW85806.1 capsid protein C |
| AXQ40006.1 Flavivirus capsid protein C | AVW85805.1 capsid protein C |
| QGA67054.1 Flavivirus capsid protein C | AVW85804.1 capsid protein C |
| QGA67053.1 Flavivirus capsid protein C | AVW85803.1 capsid protein C |
| QGA67052.1 Flavivirus capsid protein C | AVW85802.1 capsid protein C |
| QGA67051.1 Flavivirus capsid protein C | AVW85801.1 capsid protein C |
| QGA67050.1 Flavivirus capsid protein C | AVW85800.1 capsid protein C |
| QGA72951.1 Flavivirus capsid protein C | AWF93635.1 capsid protein C |
| AZS35405.1 Flavivirus capsid protein C | AWF93634.1 capsid protein C |
| AZS35404.1 Flavivirus capsid protein C | AWF93633.1 capsid protein C |
| AZS35403.1 Flavivirus capsid protein C | AWF93632.1 capsid protein C |
| QBM11757.1 Flavivirus capsid protein C | AWF93631.1 capsid protein C |
| QKM77299.1 Flavivirus capsid protein C | AWF93630.1 capsid protein C |
| QKM77298.1 Flavivirus capsid protein C | AWF93629.1 capsid protein C |
| QKU35968.1 Flavivirus capsid protein C | AWF93628.1 capsid protein C |
| QKX95861.1 Flavivirus capsid protein C | AWF93627.1 capsid protein C |
| QLI34051.1 Flavivirus capsid protein C | AWF93626.1 capsid protein C |
| QTA38994.1 Flavivirus capsid protein C | AWF93625.1 capsid protein C |
| QTA38993.1 Flavivirus capsid protein C | AWF93624.1 capsid protein C |
| QVL61761.1 Flavivirus capsid protein C | AWF93623.1 capsid protein C |
| QKF93438.1 Flavivirus capsid protein C | AWF93622.1 capsid protein C |
| QKF93437.1 Flavivirus capsid protein C | AWF93621.1 capsid protein C |
| QKF93436.1 Flavivirus capsid protein C | AWF93620.1 capsid protein C |
| QKF93434.1 Flavivirus capsid protein C | YP 009227196.1 Flavivirus capsid protein C |
| QKF93433.1 Flavivirus capsid protein C | AMR39836.1 Flavivirus capsid protein C |
| QKF93432.1 Flavivirus capsid protein C | AMR39833.1 Flavivirus capsid protein C |
| QKF93431.1 Flavivirus capsid protein C | AMR39832.1 Flavivirus capsid protein C |
| QKF93429.1 Flavivirus capsid protein C | ANW07474.2 Flavivirus capsid protein C |
| QKF93428.1 Flavivirus capsid protein C | AUY62553.1 Flavivirus capsid protein C |
| UHI99866.1 Flavivirus capsid protein C | AUY62552.1 Flavivirus capsid protein C |
| UHI99865.1 Flavivirus capsid protein C | ARM59240.1 capsid protein C |
| YP_009428568.1 Flavivirus capsid protein C | BAP47441.1 Flavivirus capsid protein C |
| YP_009430295.1 Flavivirus capsid protein C | AMR39835.1 Flavivirus capsid protein C |
| AMQ48982.1 capsid protein C | ANW07477.1 Flavivirus capsid protein C |
| AMQ48981.1 capsid protein C | AOR51315.1 Flavivirus capsid protein C |
| ANB66184.1 capsid protein C | ARM59240.1 Flavivirus capsid protein C |
| ANB66183.1 capsid protein C | AVW85863.1 Flavivirus capsid protein C |
| ANB66182.1 capsid protein C | AVW85862.1 Flavivirus capsid protein C |
| ANC90428.1 capsid protein C | AVW85861.1 Flavivirus capsid protein C |
| ANN83273.1 capsid protein C | AVW85860.1 Flavivirus capsid protein C |
| ANN83272.1 capsid protein C | AVW85859.1 Flavivirus capsid protein C |
| ANW07475.1 capsid protein C | AVW85858.1 Flavivirus capsid protein C |
| AOC50654.1 capsid protein C | AVW85857.1 Flavivirus capsid protein C |
| AOC50653.1 capsid protein C | AVW85856.1 Flavivirus capsid protein C |
| AOC50652.1 capsid protein C | AVW85855.1 Flavivirus capsid protein C |
| APH11492.1 capsid protein C | AVW85854.1 Flavivirus capsid protein C |
| AQV07165.1 capsid protein C | AVW85853.1 Flavivirus capsid protein C |
| AQZ41956.1 capsid protein C | AVW85852.1 Flavivirus capsid protein C |
| AQZ41955.1 capsid protein C | AVW85851.1 Flavivirus capsid protein C |
| AQZ41954.1 capsid protein C | AVW85850.1 Flavivirus capsid protein C |
| AQZ41953.1 capsid protein C | AVW85849.1 Flavivirus capsid protein C |
| AQZ41952.1 capsid protein C | AVW85848.1 Flavivirus capsid protein C |
| AQZ41951.1 capsid protein C | AVW85847.1 Flavivirus capsid protein C |
| AQZ41950.1 capsid protein C | AVW85846.1 Flavivirus capsid protein C |
| AQZ41949.1 capsid protein C | AVW85845.1 Flavivirus capsid protein C |
| AQZ41948.1 capsid protein C | AVW85844.1 Flavivirus capsid protein C |
| AQZ41947.1 capsid protein C | AVW85843.1 Flavivirus capsid protein C |
| AWF93619.1 capsid protein C | AVW85842.1 Flavivirus capsid protein C |
| AWF93617.1 capsid protein C | AVW85841.1 Flavivirus capsid protein C |
| AXQ40007.1 capsid protein C | AVW85840.1 Flavivirus capsid protein C |
| AXQ40006.1 capsid protein C | AVW85839.1 Flavivirus capsid protein C |
| QFZ95661.1 capsid protein C | AVW85838.1 Flavivirus capsid protein C |
| QGA67056.1 capsid protein C | AVW85837.1 Flavivirus capsid protein C |
| QGA67055.1 capsid protein C | AVW85836.1 Flavivirus capsid protein C |
| QGA67054.1 capsid protein C | AVW85835.1 Flavivirus capsid protein C |
| QGA67053.1 capsid protein C | AVW85834.1 Flavivirus capsid protein C |
| QGA67052.1 capsid protein C | AVW85833.1 Flavivirus capsid protein C |
| QGA67051.1 capsid protein C | AVW85832.1 Flavivirus capsid protein C |
| QGA67050.1 capsid protein C | AVW85831.1 Flavivirus capsid protein C |
| QGA72951.1 capsid protein C | AVW85830.1 Flavivirus capsid protein C |
| QKM77299.1 capsid protein C | AVW85829.1 Flavivirus capsid protein C |
| QKM77298.1 capsid protein C | AVW85828.1 Flavivirus capsid protein C |
| QKU35968.1 capsid protein C | AVW85827.1 Flavivirus capsid protein C |
| QOF88708.1 capsid protein C | AVW85826.1 Flavivirus capsid protein C |
| QKF93441.1 capsid protein C | AVW85825.1 Flavivirus capsid protein C |
| QKF93440.1 capsid protein C | AVW85824.1 Flavivirus capsid protein C |
| QKF93439.1 capsid protein C | AVW85823.1 Flavivirus capsid protein C |
| QKF93438.1 capsid protein C | AVW85822.1 Flavivirus capsid protein C |
| QKF93437.1 capsid protein C | AVW85821.1 Flavivirus capsid protein C |
| QKF93436.1 capsid protein C | AVW85820.1 Flavivirus capsid protein C |
| QKF93435.1 capsid protein C | AVW85819.1 Flavivirus capsid protein C |
| QKF93434.1 capsid protein C | AVW85818.1 Flavivirus capsid protein C |
| QKF93433.1 capsid protein C | AVW85817.1 Flavivirus capsid protein C |
| QKF93432.1 capsid protein C | AVW85816.1 Flavivirus capsid protein C |
| QKF93431.1 capsid protein C | AVW85815.1 Flavivirus capsid protein C |
| QKF93430.1 capsid protein C | AVW85814.1 Flavivirus capsid protein C |
| QKF93429.1 capsid protein C | AVW85813.1 Flavivirus capsid protein C |
| QKF93428.1 capsid protein C | AVW85812.1 Flavivirus capsid protein C |
| UBI73854.1 capsid protein C | AVW85811.1 Flavivirus capsid protein C |
| UED15620.1 capsid protein C | AVW85810.1 Flavivirus capsid protein C |
| UHI99867.1 capsid protein C | AVW85809.1 Flavivirus capsid protein C |
| UHI99866.1 capsid protein C | AVW85808.1 Flavivirus capsid protein C |
| UHI99865.1 capsid protein C | AVW85807.1 Flavivirus capsid protein C |
| YP_009428568.1 capsid protein C | AVW85806.1 Flavivirus capsid protein C |
| YP_009430296.1 capsid protein C | AVW85805.1 Flavivirus capsid protein C |
| YP_009430296.1 Flavivirus capsid protein C | AVW85804.1 Flavivirus capsid protein C |
| QOF88708.1 anchored capsid protein C | AVW85803.1 Flavivirus capsid protein C |
| QKF93441.1 anchored capsid protein C | AVW85802.1 Flavivirus capsid protein C |
| QKF93440.1 anchored capsid protein C | AVW85801.1 Flavivirus capsid protein C |
| QKF93439.1 anchored capsid protein C | AVW85800.1 Flavivirus capsid protein C |
| QKF93435.1 anchored capsid protein C | AWF93635.1 Flavivirus capsid protein C |
| QKF93430.1 anchored capsid protein C | AWF93634.1 Flavivirus capsid protein C |
| AMQ34004.1 capsid | AWF93633.1 Flavivirus capsid protein C |
| AMQ34003.1 capsid | AWF93632.1 Flavivirus capsid protein C |
| QGA67056.1 anchored capsid protein C | AWF93631.1 Flavivirus capsid protein C |
| QGA67055.1 anchored capsid protein C | AWF93630.1 Flavivirus capsid protein C |
| UED15620.1 anchored capsid protein C | AWF93629.1 Flavivirus capsid protein C |
| AXQ40005.1 anchored capsid protein C | AWF93628.1 Flavivirus capsid protein C |
| AXQ40004.1 anchored capsid protein C | AWF93627.1 Flavivirus capsid protein C |
| AXQ40003.1 anchored capsid protein C | AWF93626.1 Flavivirus capsid protein C |
| AXQ40002.1 anchored capsid protein C | AWF93625.1 Flavivirus capsid protein C |
| AXQ40001.1 anchored capsid protein C | AWF93624.1 Flavivirus capsid protein C |
| AXQ40000.1 anchored capsid protein C | AWF93623.1 Flavivirus capsid protein C |
| AXQ39999.1 anchored capsid protein C | AWF93622.1 Flavivirus capsid protein C |
| AXQ39998.1 anchored capsid protein C | AWF93621.1 Flavivirus capsid protein C |
| AXQ39997.1 anchored capsid protein C | AWF93620.1 Flavivirus capsid protein C |
| AXQ39996.1 anchored capsid protein C | AYU74865.1 Flavivirus capsid protein C |
| QKM77301.1 anchored capsid protein C | QPC45464.1 Flavivirus capsid protein C |
| QKM77300.1 anchored capsid protein C | ASR91936.1 Flavivirus capsid protein C |
| QFZ95661.1 anchored capsid protein C | QDH45910.1 Flavivirus capsid protein C |
| AMK79469.1 Flavivirus capsid protein C | AAV34151.1 Flavivirus capsid protein C |
| AMD61710.1 Flavivirus capsid protein C | YP_002790881.1 Flavivirus capsid protein C |
| AMR39834.1 Flavivirus capsid protein C | YP_009227206.1 Flavivirus capsid protein C |
| AMX81917.1 Flavivirus capsid protein C | YP_002790881.1 capsid protein C |
| AMX81916.1 Flavivirus capsid protein C | YP_009227196.1 capsid protein C |
| AVZ47169.1 Flavivirus capsid protein C | YP_009227206.1 anchored capsid protein C |
| AWH65848.1 Flavivirus capsid protein C | |

TABLE 1J
Non-limiting example Zika Protein E sequences by accession number

| | |
|---|---|
| AMQ34004.1 Env | ARU07076.1 Flavi_glycoprot |
| AMQ34003.1 Env | AYV74937.1 Flavi_glycoprot |
| AMQ48981.1 envelope protein E | AYV74936.1 Flavi_glycoprot |
| ANB66184.1 envelope protein E | AYV74935.1 Flavi_glycoprot |
| ANB66183.1 envelope protein E | AYV74934.1 Flavi_glycoprot |
| ANB66182.1 envelope protein E | AYV74933.1 Flavi_glycoprot |
| ANC90428.1 envelope protein E | AYV74932.1 Flavi_glycoprot |
| ANN83273.1 envelope protein E | AWF93617.1 Flavi_glycoprot |
| ANN83272.1 envelope protein E | AMD61710.1 Flavi_glycoprot |
| AOC50652.1 envelope protein E | AVC63698.1 Flavi_glycoprot |
| APH11492.1 envelope protein E | AVC63697.1 Flavi_glycoprot |
| AQV07165.1 envelope protein E | AVZ47169.1 Flavi_glycoprot |
| AQZ41956.1 envelope protein E | QKF93435.1 envelope protein E |
| AQZ41955.1 envelope protein E | QFZ95661.1 envelope protein E |
| AQZ41954.1 envelope protein E | QKF93440.1 envelope protein E |
| AQZ41953.1 envelope protein E | QKF93433.1 envelope protein E |
| AQZ41952.1 envelope protein E | AXQ40006.1 envelope protein E |
| AQZ41951.1 envelope protein E | QOF88708.1 envelope protein E |
| AQZ41950.1 envelope protein E | QKF93439.1 envelope protein E |
| AQZ41949.1 envelope protein E | BAX00477.1 Flavi_glycoprot |
| AQZ41948.1 envelope protein E | QKF93441.1 envelope protein E |
| AQZ41947.1 envelope protein E | AOC50653.1 envelope protein E |
| AWF93619.1 envelope protein E | ANW07475.1 envelope protein E |
| AWF93618.1 envelope protein E | AUY62553.1 Flavi_glycoprot |
| QGA67055.1 envelope protein E | ASR91936.1 Flavi_glycoprot |
| QGA67054.1 envelope protein E | AZS35405.1 flavi_E_stem |
| QGA67053.1 envelope protein E | AZS35404.1 flavi_E_stem |
| QGA67052.1 envelope protein E | AZS35403.1 flavi_E_stem |
| QGA67051.1 envelope protein E | AMM39806.1 flavi_E_stem |
| QGA67050.1 envelope protein E | ANA12599.1 flavi_E_stem |
| QKM77301.1 envelope protein E | ANF16414.1 flavi_E_stem |
| QKM77300.1 envelope protein E | AMM43326.1 flavi_E_stem |
| QKM77299.1 envelope protein E | AMM43325.1 flavi_E_stem |
| QKM77298.1 envelope protein E | AUI42330.1 flavi_E_stem |
| QKU35968.1 envelope protein E | AUI42329.1 flavi_E_stem |
| QTA38994.1 envelope protein E | QKF93430.1 flavi_E_stem |
| QKF93438.1 envelope protein E | AMD61710.1 flavi_E_stem |
| QKF93436.1 envelope protein E | AVC63698.1 flavi_E_stem |
| QKF93434.1 envelope protein E | AVC63697.1 flavi_E_stem |
| QKF93432.1 envelope protein E | QDZ58856.1 flavi_E_stem |
| QKF93429.1 envelope protein E | AMR39834.1 flavi_E_stem |
| UED15620.1 envelope protein E | AWH65848.1 flavi_E_stem |
| UHI99867.1 envelope protein E | QOF88708.1 flavi_E_stem |
| UHI99866.1 envelope protein E | QKF93439.1 flavi_E_stem |
| UHI99865.1 envelope protein E | QKF93435.1 flavi_E_stem |
| YP_009428568.1 envelope protein E | QKF93437.1 flavi_E_stem |
| YP_009430300.1 envelope protein E | AXQ40007.1 flavi_E_stem |
| AXQ40005.1 envelope protein E | AXQ40006.1 flavi_E_stem |
| AXQ40004.1 envelope protein E | QKF93433.1 flavi_E_stem |
| AXQ40003.1 envelope protein E | APC60216.2 flavi_E_stem |
| AXQ40001.1 envelope protein E | AMK79469.1 flavi_E_stem |
| AXQ39999.1 envelope protein E | AMQ48986.1 Flavi_E_C |
| AXQ39998.1 envelope protein E | QKF93435.1 Flavi_E_C |
| AXQ39997.1 envelope protein E | QOF88708.1 Flavi_E_C |
| AXQ39996.1 envelope protein E | QKF93441.1 Flavi_E_C |
| AMB18850.1 Flavi_glycoprot | QKF93439.1 Flavi_E_C |
| AMM39806.1 Flavi_glycoprot | ANW07476.1 Flavi_E_C |
| ANA12599.1 Flavi_glycoprot | AYI50275.1 Flavi_E_C |
| ANB66182.1 Flavi_glycoprot | AYI50274.1 Flavi_E_C |
| ANC90428.1 Flavi_glycoprot | AYI50273.1 Flavi_E_C |
| ANF16414.1 Flavi_glycoprot | QCG74166.1 Flavi_E_C |
| ANK57897.1 Flavi_glycoprot | AMQ48982.1 Flavi_E_C |
| ANN44857.1 Flavi_glycoprot | QFZ95661.1 Flavi_E_C |
| AOG18296.1 Flavi_glycoprot | AZS35405.1 Flavi_E_C |
| AND01116.2 Flavi_glycoprot | AZS35403.1 Flavi_E_C |
| APH11492.1 Flavi_glycoprot | AXF50052.1 Flavi_E_C |
| AMM43326.1 Flavi_glycoprot | AXQ40002.1 Flavi_E_C |
| AMM43325.1 Flavi_glycoprot | QKX95861.1 Flavi_E_C |
| APO36913.1 Flavi_glycoprot | QKF93440.1 Flavi_E_C |
| AOO19564.1 Flavi_glycoprot | QLI34051.1 Flavi_E_C |
| AQV07165.1 Flavi_glycoprot | AMD61710.1 Flavi_E_C |
| AQW43708.1 Flavi_glycoprot | AVC63698.1 Flavi_E_C |
| AQW43707.1 Flavi_glycoprot | AVC63697.1 Flavi_E_C |
| AQZ41955.1 Flavi_glycoprot | APC60216.2 Flavi_glycoprot |
| AQZ41953.1 Flavi_glycoprot | AQS26698.1 Flavi_glycoprot |
| AQZ41952.1 Flavi_glycoprot | AOR51315.1 Flavi_glycoprot |
| AQZ41949.1 Flavi_glycoprot | ARM59240.1 Flavi_glycoprot |
| AMX81917.1 Flavi_glycoprot | UBI73854.1 envelope protein E |
| AMX81916.1 Flavi_glycoprot | ANC90427.1 envelope protein E |
| AMX81915.1 Flavi_glycoprot | ANW07474.2 envelope protein E |
| ARM59239.1 Flavi_glycoprot | AVZ47169.1 flavi_E_stem |
| AUI42329.1 Flavi_glycoprot | QKF93441.1 flavi_E_stem |
| AVG19275.1 Flavi_glycoprot | AMD61711.1 flavi_E_stem |
| BBC70847.1 Flavi_glycoprot | AQS26698.1 flavi_E_stem |
| AWF93619.1 Flavi_glycoprot | UBI73854.1 flavi_E_stem |
| AWF93618.1 Flavi_glycoprot | AMR39836.1 Flavi_E_C |
| AWH65849.1 Flavi_glycoprot | AMR39833.1 Flavi_E_C |
| ARU07075.1 Flavi_glycoprot | AMR39832.1 Flavi_E_C |
| ARU07074.1 Flavi_glycoprot | ANW07474.2 Flavi_E_C |
| AVV62004.1 Flavi_glycoprot | AUY62553.1 Flavi_E_C |
| AVG19203.1 Flavi_glycoprot | AUY62552.1 Flavi_E_C |
| AVG19202.1 Flavi_glycoprot | ASR91936.1 Flavi_E_C |
| AUF35022.1 Flavi_glycoprot | QDH45910.1 Flavi_E_C |
| AUF35021.1 Flavi_glycoprot | QPC45464.1 Flavi_E_C |
| AXF50052.1 Flavi_glycoprot | AUI42330.1 Flavi_glycoprot |
| AXF50016.1 Flavi_glycoprot | ARM59240.1 envelope protein E |
| AXF50014.1 Flavi_glycoprot | AVW85861.1 Flavi_glycoprot |
| AYI50275.1 Flavi_glycoprot | AVW85848.1 Flavi_glycoprot |
| AYI50274.1 Flavi_glycoprot | AVW85841.1 Flavi_glycoprot |
| AYI50273.1 Flavi_glycoprot | AVW85837.1 Flavi_glycoprot |
| AYV74931.1 Flavi_glycoprot | AVW85829.1 Flavi_glycoprot |
| AYV74930.1 Flavi_glycoprot | AVW85828.1 Flavi_glycoprot |
| AYV74929.1 Flavi_glycoprot | AVW85810.1 Flavi_glycoprot |
| AYV74928.1 Flavi_glycoprot | AVW85801.1 Flavi_glycoprot |
| AYV74927.1 Flavi_glycoprot | AWF93631.1 Flavi_glycoprot |
| AYV74925.1 Flavi_glycoprot | AWF93630.1 Flavi_glycoprot |
| AYV74924.1 Flavi_glycoprot | AWF93628.1 Flavi_glycoprot |
| AYV74923.1 Flavi_glycoprot | AWF93623.1 Flavi_glycoprot |
| AYV74922.1 Flavi_glycoprot | AYU74865.1 Flavi_glycoprot |
| AYV74921.1 Flavi_glycoprot | AVW85850.1 Flavi_glycoprot |
| AYV74920.1 Flavi_glycoprot | AVW85844.1 Flavi_glycoprot |
| AYV74919.1 Flavi_glycoprot | AVW85838.1 Flavi_glycoprot |
| AYV74918.1 Flavi_glycoprot | AVW85833.1 Flavi_glycoprot |
| AYV74917.1 Flavi_glycoprot | AVW85826.1 Flavi_glycoprot |
| AYV74916.1 Flavi_glycoprot | UBI73854.1 Flavi_E_C |
| YP_009428568.1 Flavi_glycoprot | AVW85862.1 Flavi_glycoprot |
| AHZ13508.1 Flavi_E_C | AVW85860.1 Flavi_glycoprot |
| ALU33341.1 Flavi_E_C | AVW85849.1 Flavi_glycoprot |
| AMC13911.1 Flavi_E_C | AVW85832.1 Flavi_glycoprot |
| AMB37295.1 Flavi_E_C | AVW85851.1 Flavi_glycoprot |
| AMD61711.1 Flavi_E_C | AVW85847.1 Flavi_glycoprot |
| AMB18850.1 Flavi_E_C | AVW85820.1 Flavi_glycoprot |
| AMH87239.1 Flavi_E_C | AVW85817.1 Flavi_glycoprot |
| AMD16557.1 Flavi_E_C | AVW85816.1 Flavi_glycoprot |
| AMM39806.1 Flavi_E_C | AWF93635.1 Flavi_glycoprot |
| AMN14620.1 Flavi_E_C | AWF93627.1 Flavi_glycoprot |
| AMN14619.1 Flavi_E_C | AWF93621.1 Flavi_glycoprot |
| AMQ34004.1 Flavi_E_C | AWF93620.1 Flavi_glycoprot |
| AMQ34003.1 Flavi_E_C | AVW85863.1 Flavi_glycoprot |
| AMQ48981.1 Flavi_E_C | AVW85852.1 Flavi_glycoprot |
| AMR39834.1 Flavi_E_C | AVW85845.1 Flavi_glycoprot |
| AMX81919.1 Flavi_E_C | AVW85843.1 Flavi_glycoprot |
| ANA12599.1 Flavi_E_C | AVW85835.1 Flavi_glycoprot |
| ANB66183.1 Flavi_E_C | AVW85831.1 Flavi_glycoprot |
| ANB66182.1 Flavi_E_C | AVW85824.1 Flavi_glycoprot |
| ANC90428.1 Flavi_E_C | AVW85821.1 Flavi_glycoprot |
| ANF16414.1 Flavi_E_C | AVW85812.1 Flavi_glycoprot |
| ANG09399.1 Flavi_E_C | AVW85811.1 Flavi_glycoprot |
| ANH10698.1 Flavi_E_C | AVW85804.1 Flavi_glycoprot |
| ANK57897.1 Flavi_E_C | AVW85803.1 Flavi_glycoprot |
| ANN44857.1 Flavi_E_C | AVW85836.1 Flavi_glycoprot |
| ANZ46736.1 Flavi_E_C | AVW85834.1 Flavi_glycoprot |
| AOG18296.1 Flavi_E_C | AVW85823.1 Flavi_glycoprot |
| AND01116.2 Flavi_E_C | AVW85805.1 Flavi_glycoprot |
| AOR82893.1 Flavi_E_C | AVW85800.1 Flavi_glycoprot |
| AOR82892.1 Flavi_E_C | AVW85858.1 Flavi_glycoprot |
| BAV82373.1 Flavi_E_C | AVW85856.1 Flavi_glycoprot |
| ANH22038.1 Flavi_E_C | AVW85839.1 Flavi_glycoprot |
| APC60216.2 Flavi_E_C | AVW85859.1 Flavi_glycoprot |
| APO08503.1 Flavi_E_C | AVW85830.1 Flavi_glycoprot |
| APH11492.1 Flavi_E_C | AVW85827.1 Flavi_glycoprot |
| AMM43326.1 Flavi_E_C | AVW85814.1 Flavi_glycoprot |
| AMM43325.1 Flavi_E_C | AWF93633.1 Flavi_glycoprot |
| APO36913.1 Flavi_E_C | AWF93629.1 Flavi_glycoprot |
| AOO19564.1 Flavi_E_C | AWF93624.1 Flavi_glycoprot |
| AQV07165.1 Flavi_E_C | AWF93622.1 Flavi_glycoprot |
| BAX00477.1 Flavi_E_C | ANW07477.1 envelope protein E |
| AQW43708.1 Flavi_E_C | AVW85841.1 envelope protein E |
| AQW43707.1 Flavi_E_C | AVW85829.1 envelope protein E |
| AQZ41956.1 Flavi_E_C | AVW85828.1 envelope protein E |
| AQZ41955.1 Flavi_E_C | AVW85810.1 envelope protein E |
| AQZ41954.1 Flavi_E_C | AVW85801.1 envelope protein E |
| AQZ41953.1 Flavi_E_C | AVW85850.1 envelope protein E |
| AQZ41952.1 Flavi_E_C | AVW85844.1 envelope protein E |
| AQZ41951.1 Flavi_E_C | AVW85838.1 envelope protein E |
| AQZ41950.1 Flavi_E_C | AVW85833.1 envelope protein E |
| AQZ41949.1 Flavi_E_C | AVW85826.1 envelope protein E |
| AQZ41948.1 Flavi_E_C | YP_002790881.1 envelope protein E |
| AQZ41947.1 Flavi_E_C | YP_009227198.1 envelope protein E |
| AMX81917.1 Flavi_E_C | AVW85857.1 Flavi_glycoprot |
| AMX81916.1 Flavi_E_C | AVW85854.1 Flavi_glycoprot |
| AMX81915.1 Flavi_E_C | AVW85842.1 Flavi_glycoprot |
| ARM59239.1 Flavi_E_C | AVW85825.1 Flavi_glycoprot |
| APW84877.1 Flavi_E_C | AVW85818.1 Flavi_glycoprot |
| APW84876.1 Flavi_E_C | AVW85808.1 Flavi_glycoprot |
| APW84875.1 Flavi_E_C | AVW85802.1 Flavi_glycoprot |
| APW84874.1 Flavi_E_C | AVW85807.1 Flavi_glycoprot |
| APW84873.1 Flavi_E_C | AVW85840.1 Flavi_glycoprot |
| APW84872.1 Flavi_E_C | AVW85819.1 Flavi_glycoprot |
| ASB32509.1 Flavi_E_C | AVW85806.1 Flavi_glycoprot |
| ASF57880.1 Flavi_E_C | AVW85855.1 Flavi_glycoprot |
| AQS26698.1 Flavi_E_C | AVW85815.1 Flavi_glycoprot |
| ATB53752.1 Flavi_E_C | AVW85809.1 Flavi_glycoprot |
| ARB08102.1 Flavi_E_C | AWF93634.1 Flavi_glycoprot |
| AUI42330.1 Flavi_E_C | AWF93632.1 Flavi_glycoprot |
| AUI42329.1 Flavi_E_C | AWF93625.1 Flavi_glycoprot |
| AVG19275.1 Flavi_E_C | AWF93626.1 Flavi_glycoprot |
| BBC70847.1 Flavi_E_C | AVW85862.1 envelope protein E |
| AVZ47169.1 Flavi_E_C | AVW85849.1 envelope protein E |
| AWF93619.1 Flavi_E_C | AVW85832.1 envelope protein E |
| AWF93618.1 Flavi_E_C | AVW85831.1 envelope protein E |
| AWF93617.1 Flavi_E_C | AVW85804.1 envelope protein E |
| AWH65849.1 Flavi_E_C | AVW85848.1 envelope protein E |
| AWH65848.1 Flavi_E_C | AVW85837.1 envelope protein E |
| ARU07076.1 Flavi_E_C | AWF93631.1 envelope protein E |
| ARU07075.1 Flavi_E_C | AWF93630.1 envelope protein E |
| ARU07074.1 Flavi_E_C | AWF93628.1 envelope protein E |
| AVV62004.1 Flavi_E_C | AWF93623.1 envelope protein E |
| AVG19203.1 Flavi_E_C | AVW85824.1 envelope protein E |
| AVG19202.1 Flavi_E_C | AVW85834.1 envelope protein E |
| AUF35022.1 Flavi_E_C | AVW85861.1 envelope protein E |
| AUF35021.1 Flavi_E_C | AVW85858.1 envelope protein E |
| ATL14618.1 Flavi_E_C | AVW85839.1 envelope protein E |
| AXF50016.1 Flavi_E_C | AVW85827.1 envelope protein E |
| AXF50015.1 Flavi_E_C | AWF93629.1 envelope protein E |
| AXF50014.1 Flavi_E_C | AWF93624.1 envelope protein E |
| ATB53754.1 Flavi_E_C | AWF93622.1 envelope protein E |
| ATB53753.1 Flavi_E_C | AVW85808.1 envelope protein E |
| AYV74937.1 Flavi_E_C | AVW85851.1 envelope protein E |
| AYV74936.1 Flavi_E_C | AVW85847.1 envelope protein E |
| AYV74935.1 Flavi_E_C | AVW85842.1 envelope protein E |
| AYV74934.1 Flavi_E_C | AVW85820.1 envelope protein E |
| AYV74933.1 Flavi_E_C | AVW85817.1 envelope protein E |
| AYV74932.1 Flavi_E_C | AVW85863.1 envelope protein E |
| AYV74931.1 Flavi_E_C | AVW85860.1 envelope protein E |
| AYV74930.1 Flavi_E_C | AVW85852.1 envelope protein E |
| AYV74929.1 Flavi_E_C | AVW85845.1 envelope protein E |
| AYV74928.1 Flavi_E_C | AVW85843.1 envelope protein E |
| AYV74927.1 Flavi_E_C | AVW85835.1 envelope protein E |
| AYV74925.1 Flavi_E_C | AVW85821.1 envelope protein E |
| AYV74924.1 Flavi_E_C | AVW85816.1 envelope protein E |
| AYV74923.1 Flavi_E_C | AVW85812.1 envelope protein E |
| AYV74922.1 Flavi_E_C | AVW85811.1 envelope protein E |
| AYV74921.1 Flavi_E_C | AVW85803.1 envelope protein E |
| AYV74920.1 Flavi_E_C | AVW85854.1 envelope protein E |
| AYV74919.1 Flavi_E_C | AVW85825.1 envelope protein E |
| AYV74918.1 Flavi_E_C | AVW85819.1 envelope protein E |
| AYV74917.1 Flavi_E_C | AVW85806.1 envelope protein E |
| AYV74916.1 Flavi_E_C | AVW85836.1 envelope protein E |
| AXQ40007.1 Flavi_E_C | AVW85823.1 envelope protein E |
| AXQ40006.1 Flavi_E_C | AVW85805.1 envelope protein E |
| AXQ40005.1 Flavi_E_C | AVW85800.1 envelope protein E |
| AXQ40004.1 Flavi_E_C | AWF93620.1 envelope protein E |
| AXQ40003.1 Flavi_E_C | AVW85830.1 envelope protein E |
| AXQ40001.1 Flavi_E_C | AVW85814.1 envelope protein E |
| AXQ40000.1 Flavi_E_C | AVW85807.1 envelope protein E |
| AXQ39999.1 Flavi_E_C | AVW85859.1 envelope protein E |
| AXQ39998.1 Flavi_E_C | AVW85856.1 envelope protein E |
| AXQ39997.1 Flavi_E_C | AVW85840.1 envelope protein E |
| AXQ39996.1 Flavi_E_C | AWF93632.1 envelope protein E |
| QDZ58856.1 Flavi_E_C | AVW85846.1 Flavi_glycoprot |
| QDZ58855.1 Flavi_E_C | AVW85853.1 Flavi_glycoprot |
| QDZ58854.1 Flavi_E_C | AVW85822.1 Flavi_glycoprot |
| QGA67056.1 Flavi_E_C | AVW85813.1 Flavi_glycoprot |
| QGA67055.1 Flavi_E_C | AVW85846.1 envelope protein E |
| QGA67054.1 Flavi_E_C | AWF93635.1 envelope protein E |
| QGA67053.1 Flavi_E_C | AWF93627.1 envelope protein E |
| QGA67052.1 Flavi_E_C | AWF93621.1 envelope protein E |
| QGA67051.1 Flavi_E_C | AVW85857.1 envelope protein E |
| QGA67050.1 Flavi_E_C | AVW85855.1 envelope protein E |
| QGA72951.1 Flavi_E_C | AVW85818.1 envelope protein E |
| AZS35404.1 Flavi_E_C | AVW85815.1 envelope protein E |
| QBM11757.1 Flavi_E_C | AVW85809.1 envelope protein E |
| QKM77301.1 Flavi_E_C | AWF93633.1 envelope protein E |
| QKM77300.1 Flavi_E_C | AWF93634.1 envelope protein E |
| QKM77299.1 Flavi_E_C | AWF93625.1 envelope protein E |
| QKM77298.1 Flavi_E_C | AWF93626.1 envelope protein E |
| QKU35968.1 Flavi_E_C | AAV34151.1 Flavi_E_C |
| QTA38994.1 Flavi_E_C | BAP47441.1 Flavi_E_C |
| QTA38993.1 Flavi_E_C | AMR39835.1 Flavi_E_C |
| QVL61761.1 Flavi_E_C | ANW07477.1 Flavi_E_C |
| QKF93438.1 Flavi_E_C | AOR51315.1 Flavi_E_C |
| QKF93437.1 Flavi_E_C | ARM59240.1 Flavi_E_C |
| QKF93436.1 Flavi_E_C | AVW85863.1 Flavi_E_C |
| QKF93434.1 Flavi_E_C | AVW85862.1 Flavi_E_C |
| QKF93433.1 Flavi_E_C | AVW85859.1 Flavi_E_C |
| QKF93432.1 Flavi_E_C | AVW85858.1 Flavi_E_C |
| QKF93431.1 Flavi_E_C | AVW85856.1 Flavi_E_C |
| QKF93430.1 Flavi_E_C | AVW85855.1 Flavi_E_C |
| QKF93429.1 Flavi_E_C | AVW85854.1 Flavi_E_C |
| QKF93428.1 Flavi_E_C | AVW85850.1 Flavi_E_C |
| UED15620.1 Flavi_E_C | AVW85849.1 Flavi_E_C |
| UHI99866.1 Flavi_E_C | AVW85846.1 Flavi_E_C |
| UHI99865.1 Flavi_E_C | AVW85844.1 Flavi_E_C |
| YP_009428568.1 Flavi_E_C | AVW85843.1 Flavi_E_C |
| YP_009430300.1 Flavi_E_C | AVW85842.1 Flavi_E_C |
| AHZ13508.1 flavi_E_stem | AVW85841.1 Flavi_E_C |
| ALU33341.1 flavi_E_stem | AVW85840.1 Flavi_E_C |
| AMC13911.1 flavi_E_stem | AVW85839.1 Flavi_E_C |
| AMB37295.1 flavi_E_stem | AVW85838.1 Flavi_E_C |
| AMB18850.1 flavi_E_stem | AVW85834.1 Flavi_E_C |
| AMH87239.1 flavi_E_stem | AVW85833.1 Flavi_E_C |
| AMD16557.1 flavi_E_stem | AVW85832.1 Flavi_E_C |
| AMN14620.1 flavi_E_stem | AVW85831.1 Flavi_E_C |
| AMN14619.1 flavi_E_stem | AVW85829.1 Flavi_E_C |
| AMQ34004.1 flavi_E_stem | AVW85828.1 Flavi_E_C |
| AMQ34003.1 flavi_E_stem | AVW85827.1 Flavi_E_C |
| AMQ48982.1 flavi_E_stem | AVW85826.1 Flavi_E_C |
| AMQ48981.1 flavi_E_stem | AVW85825.1 Flavi_E_C |
| AMQ48986.1 flavi_E_stem | AVW85824.1 Flavi_E_C |
| AMX81919.1 flavi_E_stem | AVW85819.1 Flavi_E_C |
| ANB66183.1 flavi_E_stem | AVW85816.1 Flavi_E_C |
| ANB66182.1 flavi_E_stem | AVW85815.1 Flavi_E_C |
| ANC90428.1 flavi_E_stem | AVW85810.1 Flavi_E_C |
| ANG09399.1 flavi_E_stem | AVW85809.1 Flavi_E_C |
| ANH10698.1 flavi_E_stem | AVW85808.1 Flavi_E_C |
| ANK57897.1 flavi_E_stem | AVW85807.1 Flavi_E_C |
| ANN44857.1 flavi_E_stem | AVW85806.1 Flavi_E_C |
| ANW07476.1 flavi_E_stem | AVW85804.1 Flavi_E_C |
| ANZ46736.1 flavi_E_stem | AVW85801.1 Flavi_E_C |
| AOG18296.1 flavi_E_stem | AWF93632.1 Flavi_E_C |
| AND01116.2 flavi_E_stem | AWF93629.1 Flavi_E_C |
| AOR82893.1 flavi_E_stem | AWF93624.1 Flavi_E_C |
| AOR82892.1 flavi_E_stem | AWF93622.1 Flavi_E_C |
| BAV82373.1 flavi_E_stem | AYU74865.1 Flavi_E_C |
| ANH22038.1 flavi_E_stem | YP_002790881.1 Flavi_E_C |
| APO08503.1 flavi_E_stem | YP_009227198.1 Flavi_E_C |
| APH11492.1 flavi_E_stem | AMK79469.1 Flavi_E_C |
| APO36913.1 flavi_E_stem | AVW85802.1 envelope protein E |
| AOO19564.1 flavi_E_stem | AVW85853.1 envelope protein E |
| AQV07165.1 flavi_E_stem | AVW85822.1 envelope protein E |
| BAX00477.1 flavi_E_stem | AVW85813.1 envelope protein E |
| AQW43708.1 flavi_E_stem | AAV34151.1 flavi_E_stem |
| AQW43707.1 flavi_E_stem | BAP47441.1 flavi_E_stem |
| AQZ41956.1 flavi_E_stem | AMR39836.1 flavi_E_stem |
| AQZ41955.1 flavi_E_stem | AMR39835.1 flavi_E_stem |
| AQZ41954.1 flavi_E_stem | AMR39833.1 flavi_E_stem |
| AQZ41953.1 flavi_E_stem | AMR39832.1 flavi_E_stem |
| AQZ41952.1 flavi_E_stem | ANW07477.1 flavi_E_stem |
| AQZ41951.1 flavi_E_stem | ANW07474.2 flavi_E_stem |
| AQZ41950.1 flavi_E_stem | AOR51315.1 flavi_E_stem |
| AQZ41949.1 flavi_E_stem | ARM59240.1 flavi_E_stem |
| AQZ41948.1 flavi_E_stem | AVW85862.1 flavi_E_stem |
| AQZ41947.1 flavi_E_stem | AVW85861.1 flavi_E_stem |
| AMX81917.1 flavi_E_stem | AVW85860.1 flavi_E_stem |
| AMX81916.1 flavi_E_stem | AVW85858.1 flavi_E_stem |
| AMX81915.1 flavi_E_stem | AVW85857.1 flavi_E_stem |
| ARM59239.1 flavi_E_stem | AVW85854.1 flavi_E_stem |
| APW84877.1 flavi_E_stem | AVW85853.1 flavi_E_stem |
| APW84876.1 flavi_E_stem | AVW85852.1 flavi_E_stem |
| APW84875.1 flavi_E_stem | AVW85851.1 flavi_E_stem |
| APW84874.1 flavi_E_stem | AVW85850.1 flavi_E_stem |
| APW84873.1 flavi_E_stem | AVW85849.1 flavi_E_stem |
| APW84872.1 flavi_E_stem | AVW85848.1 flavi_E_stem |
| ASB32509.1 flavi_E_stem | AVW85847.1 flavi_E_stem |
| ASF57880.1 flavi_E_stem | AVW85846.1 flavi_E_stem |
| ATB53752.1 flavi_E_stem | AVW85845.1 flavi_E_stem |
| ARB08102.1 flavi_E_stem | AVW85844.1 flavi_E_stem |
| AVG19275.1 flavi_E_stem | AVW85842.1 flavi_E_stem |
| BBC70847.1 flavi_E_stem | AVW85841.1 flavi_E_stem |
| AWF93619.1 flavi_E_stem | AVW85840.1 flavi_E_stem |
| AWF93618.1 flavi_E_stem | AVW85839.1 flavi_E_stem |
| AWF93617.1 flavi_E_stem | AVW85838.1 flavi_E_stem |
| AWH65849.1 flavi_E_stem | AVW85837.1 flavi_E_stem |
| ARU07076.1 flavi_E_stem | AVW85835.1 flavi_E_stem |
| ARU07075.1 flavi_E_stem | AVW85834.1 flavi_E_stem |
| ARU07074.1 flavi_E_stem | AVW85833.1 flavi_E_stem |
| AVV62004.1 flavi_E_stem | AVW85832.1 flavi_E_stem |
| AVG19203.1 flavi_E_stem | AVW85831.1 flavi_E_stem |
| AVG19202.1 flavi_E_stem | AVW85830.1 flavi_E_stem |
| AUF35022.1 flavi_E_stem | AVW85829.1 flavi_E_stem |
| AUF35021.1 flavi_E_stem | AVW85828.1 flavi_E_stem |
| ATL14618.1 flavi_E_stem | AVW85827.1 flavi_E_stem |
| AXF50052.1 flavi_E_stem | AVW85826.1 flavi_E_stem |
| AXF50016.1 flavi_E_stem | AVW85825.1 flavi_E_stem |
| AXF50015.1 flavi_E_stem | AVW85824.1 flavi_E_stem |
| AXF50014.1 flavi_E_stem | AVW85822.1 flavi_E_stem |
| AYI50275.1 flavi_E_stem | AVW85821.1 flavi_E_stem |
| AYI50274.1 flavi_E_stem | AVW85820.1 flavi_E_stem |
| AYI50273.1 flavi_E_stem | AVW85819.1 flavi_E_stem |
| ATB53754.1 flavi_E_stem | AVW85818.1 flavi_E_stem |
| ATB53753.1 flavi_E_stem | AVW85817.1 flavi_E_stem |
| AYV74937.1 flavi_E_stem | AVW85814.1 flavi_E_stem |
| AYV74936.1 flavi_E_stem | AVW85813.1 flavi_E_stem |
| AYV74935.1 flavi_E_stem | AVW85812.1 flavi_E_stem |
| AYV74934.1 flavi_E_stem | AVW85811.1 flavi_E_stem |
| AYV74933.1 flavi_E_stem | AVW85810.1 flavi_E_stem |
| AYV74932.1 flavi_E_stem | AVW85808.1 flavi_E_stem |
| AYV74931.1 flavi_E_stem | AVW85807.1 flavi_E_stem |
| AYV74930.1 flavi_E_stem | AVW85806.1 flavi_E_stem |
| AYV74929.1 flavi_E_stem | AVW85804.1 flavi_E_stem |
| AYV74928.1 flavi_E_stem | AVW85803.1 flavi_E_stem |
| AYV74927.1 flavi_E_stem | AVW85801.1 flavi_E_stem |
| AYV74925.1 flavi_E_stem | AVW85800.1 flavi_E_stem |
| AYV74924.1 flavi_E_stem | AWF93635.1 flavi_E_stem |
| AYV74923.1 flavi_E_stem | AWF93634.1 flavi_E_stem |
| AYV74922.1 flavi_E_stem | AWF93633.1 flavi_E_stem |
| AYV74921.1 flavi_E_stem | AWF93632.1 flavi_E_stem |
| AYV74920.1 flavi_E_stem | AWF93631.1 flavi_E_stem |
| AYV74919.1 flavi_E_stem | AWF93630.1 flavi_E_stem |
| AYV74918.1 flavi_E_stem | AWF93629.1 flavi_E_stem |
| AYV74917.1 flavi_E_stem | AWF93628.1 flavi_E_stem |
| AYV74916.1 flavi_E_stem | AWF93627.1 flavi_E_stem |
| QCG74166.1 flavi_E_stem | AWF93626.1 flavi_E_stem |
| AXQ40005.1 flavi_E_stem | AWF93625.1 flavi_E_stem |
| AXQ40004.1 flavi_E_stem | AWF93624.1 flavi_E_stem |
| AXQ40003.1 flavi_E_stem | AWF93623.1 flavi_E_stem |
| AXQ40002.1 flavi_E_stem | AWF93622.1 flavi_E_stem |
| AXQ40001.1 flavi_E_stem | AWF93621.1 flavi_E_stem |
| AXQ40000.1 flavi_E_stem | AWF93620.1 flavi_E_stem |
| AXQ39999.1 flavi_E_stem | AUY62553.1 flavi_E_stem |
| AXQ39998.1 flavi_E_stem | AUY62552.1 flavi_E_stem |
| AXQ39997.1 flavi_E_stem | AYU74865.1 flavi_E_stem |
| AXQ39996.1 flavi_E_stem | QDH45910.1 flavi_E_stem |
| QDZ58855.1 flavi_E_stem | QPC45464.1 flavi_E_stem |
| QDZ58854.1 flavi_E_stem | YP_002790881.1 flavi_E_stem |
| QFZ95661.1 flavi_E_stem | YP_009227198.1 flavi_E_stem |
| QGA67056.1 flavi_E_stem | AVW85836.1 flavi_E_stem |
| QGA67055.1 flavi_E_stem | AVW85823.1 flavi_E_stem |
| QGA67054.1 flavi_E_stem | AVW85805.1 flavi_E_stem |
| QGA67053.1 flavi_E_stem | AVW85860.1 Flavi_E_C |
| QGA67052.1 flavi_E_stem | AVW85857.1 Flavi_E_C |
| QGA67051.1 flavi_E_stem | AVW85853.1 Flavi_E_C |
| QGA67050.1 flavi_E_stem | AVW85852.1 Flavi_E_C |
| QGA72951.1 flavi_E_stem | AVW85851.1 Flavi_E_C |
| QBM11757.1 flavi_E_stem | AVW85848.1 Flavi_E_C |
| QKM77301.1 flavi_E_stem | AVW85847.1 Flavi_E_C |
| QKM77300.1 flavi_E_stem | AVW85845.1 Flavi_E_C |
| QKM77299.1 flavi_E_stem | AVW85837.1 Flavi_E_C |
| QKM77298.1 flavi_E_stem | AVW85836.1 Flavi_E_C |
| QKU35968.1 flavi_E_stem | AVW85835.1 Flavi_E_C |
| QKX95861.1 flavi_E_stem | AVW85830.1 Flavi_E_C |
| QLI34051.1 flavi_E_stem | AVW85823.1 Flavi_E_C |
| QTA38994.1 flavi_E_stem | AVW85822.1 Flavi_E_C |
| QTA38993.1 flavi_E_stem | AVW85821.1 Flavi_E_C |
| QVL61761.1 flavi_E_stem | AVW85820.1 Flavi_E_C |
| QKF93440.1 flavi_E_stem | AVW85818.1 Flavi_E_C |
| QKF93438.1 flavi_E_stem | AVW85817.1 Flavi_E_C |
| QKF93436.1 flavi_E_stem | AVW85814.1 Flavi_E_C |
| QKF93434.1 flavi_E_stem | AVW85813.1 Flavi_E_C |
| QKF93432.1 flavi_E_stem | AVW85812.1 Flavi_E_C |
| QKF93431.1 flavi_E_stem | AVW85811.1 Flavi_E_C |
| QKF93429.1 flavi_E_stem | AVW85805.1 Flavi_E_C |
| QKF93428.1 flavi_E_stem | AVW85803.1 Flavi_E_C |
| UED15620.1 flavi_E_stem | AVW85802.1 Flavi_E_C |
| UHI99866.1 flavi_E_stem | AVW85800.1 Flavi_E_C |
| UHI99865.1 flavi_E_stem | AWF93634.1 Flavi_E_C |
| YP_009428568.1 flavi_E_stem | AWF93626.1 Flavi_E_C |
| YP_009430300.1 flavi_E_stem | AWF93625.1 Flavi_E_C |
| ASB32509.1 envelope protein E | AWF93620.1 Flavi_E_C |
| QKF93431.1 envelope protein E | AWF93631.1 Flavi_E_C |
| QGA72951.1 envelope protein E | AWF93630.1 Flavi_E_C |
| AOC50654.1 envelope protein E | AWF93628.1 Flavi_E_C |
| AWF93617.1 envelope protein E | AWF93623.1 Flavi_E_C |
| AMQ48982.1 envelope protein E | AVW85861.1 Flavi_E_C |
| ANW07476.1 envelope protein E | ASR91936.1 flavi_E_stem |
| AYI50275.1 envelope protein E | AVW85863.1 flavi_E_stem |
| AYI50274.1 envelope protein E | AVW85843.1 flavi_E_stem |
| AYI50273.1 envelope protein E | AVW85802.1 flavi_E_stem |
| QKF93430.1 envelope protein E | AVW85859.1 flavi_E_stem |
| QKF93428.1 envelope protein E | AVW85856.1 flavi_E_stem |
| QKX95861.1 envelope protein E | AVW85855.1 flavi_E_stem |
| QGA67056.1 envelope protein E | AVW85816.1 flavi_E_stem |
| QKF93437.1 envelope protein E | AVW85815.1 flavi_E_stem |
| QTA38993.1 envelope protein E | AVW85809.1 flavi_E_stem |
| AXQ40002.1 envelope protein E | AWF93635.1 Flavi_E_C |
| AXQ40007.1 envelope protein E | AWF93633.1 Flavi_E_C |
| AXQ40000.1 envelope protein E | AWF93627.1 Flavi_E_C |
| ALU33341.1 Flavi_glycoprot | AWF93621.1 Flavi_E_C |
| ATB53754.1 Flavi_glycoprot | |

TABLE 1K
Non-limiting example Zika Protein M sequences by accession number

| | |
|---|---|
| AMQ48982.1 membrane glycoprotein precursor M | AMD61711.1 Flavivirus polyprotein propeptide |
| AMQ48981.1 membrane glycoprotein precursor M | QKF93432.1 membrane glycoprotein precursor M |
| APH11492.1 membrane glycoprotein precursor M | QKF93431.1 membrane glycoprotein precursor M |
| AXQ40007.1 membrane glycoprotein precursor M | QKM77301.1 membrane glycoprotein precursor M |
| AXQ40006.1 membrane glycoprotein precursor M | QKM77300.1 membrane glycoprotein precursor M |
| AXQ40004.1 membrane glycoprotein precursor M | QKM77298.1 membrane glycoprotein precursor M |
| AXQ40001.1 membrane glycoprotein precursor M | AXQ40002.1 Flavivirus polyprotein propeptide |
| AXQ40000.1 membrane glycoprotein precursor M | ATL14618.1 Flavivirus polyprotein propeptide |
| AXQ39998.1 membrane glycoprotein precursor M | QGA72951.1 Flavivirus polyprotein propeptide |
| AXQ39997.1 membrane glycoprotein precursor M | QOF88708.1 Flavivirus polyprotein propeptide |
| QFZ95661.1 membrane glycoprotein precursor M | QVL61761.1 Flavivirus polyprotein propeptide |
| QGA67056.1 membrane glycoprotein precursor M | QKF93441.1 Flavivirus polyprotein propeptide |
| QGA67055.1 membrane glycoprotein precursor M | QKF93440.1 Flavivirus polyprotein propeptide |
| QGA67054.1 membrane glycoprotein precursor M | QKF93439.1 Flavivirus polyprotein propeptide |
| QGA67053.1 membrane glycoprotein precursor M | QKF93438.1 Flavivirus polyprotein propeptide |
| QGA67052.1 membrane glycoprotein precursor M | QKF93437.1 Flavivirus polyprotein propeptide |
| QGA67051.1 membrane glycoprotein precursor M | QKF93436.1 Flavivirus polyprotein propeptide |
| QGA67050.1 membrane glycoprotein precursor M | QKF93435.1 Flavivirus polyprotein propeptide |
| QKU35968.1 membrane glycoprotein precursor M | QKF93434.1 Flavivirus polyprotein propeptide |
| UED15620.1 membrane glycoprotein precursor M | QKF93433.1 Flavivirus polyprotein propeptide |
| UHI99867.1 membrane glycoprotein precursor M | QKF93432.1 Flavivirus polyprotein propeptide |
| UHI99866.1 membrane glycoprotein precursor M | QKF93431.1 Flavivirus polyprotein propeptide |
| UHI99865.1 membrane glycoprotein precursor M | QKF93430.1 Flavivirus polyprotein propeptide |
| YP_009428568.1 membrane glycoprotein precursor M | QKF93429.1 Flavivirus polyprotein propeptide |
| YP_009430297.1 membrane glycoprotein precursor M | QKF93428.1 Flavivirus polyprotein propeptide |
| AMQ34004.1 protein pr | QKM77301.1 Flavivirus polyprotein propeptide |
| AMQ34003.1 protein pr | QKM77300.1 Flavivirus polyprotein propeptide |
| AMQ48982.1 protein pr | QKM77299.1 Flavivirus polyprotein propeptide |
| AMQ48981.1 protein pr | QKM77298.1 Flavivirus polyprotein propeptide |
| ANB66184.1 protein pr | QKF93432.1 membrane glycoprotein M |
| ANB66183.1 protein pr | QKF93431.1 membrane glycoprotein M |
| ANB66182.1 protein pr | QKM77301.1 membrane glycoprotein M |
| ANC90428.1 protein pr | QKM77300.1 membrane glycoprotein M |
| ANN83273.1 protein pr | QKM77298.1 membrane glycoprotein M |
| ANW07476.1 protein pr | AXQ40005.1 membrane glycoprotein M |
| AOC50654.1 protein pr | AMQ34003.1 membrane glycoprotein M |
| AOO19564.1 protein pr | AXQ39999.1 membrane glycoprotein M |
| AQV07165.1 protein pr | AYV74937.1 Flavivirus envelope glycoprotein M |
| AQZ41956.1 protein pr | AYV74936.1 Flavivirus envelope glycoprotein M |
| AQZ41955.1 protein pr | AYV74935.1 Flavivirus envelope glycoprotein M |
| AQZ41954.1 protein pr | AYV74934.1 Flavivirus envelope glycoprotein M |
| AQZ41953.1 protein pr | AYV74933.1 Flavivirus envelope glycoprotein M |
| AQZ41952.1 protein pr | AYV74932.1 Flavivirus envelope glycoprotein M |
| AQZ41951.1 protein pr | BAX00477.1 Flavivirus envelope glycoprotein M |
| AQZ41950.1 protein pr | AMD61711.1 Flavivirus envelope glycoprotein M |
| AQZ41949.1 protein pr | AMQ48986.1 Flavivirus envelope glycoprotein M |
| AQZ41948.1 protein pr | ANN44857.1 Flavivirus envelope glycoprotein M |
| AQZ41947.1 protein pr | AVG19275.1 Flavivirus envelope glycoprotein M |
| AWF93619.1 protein pr | AQW43708.1 Flavivirus envelope glycoprotein M |
| AWF93618.1 protein pr | AMQ34003.1 Flavivirus envelope glycoprotein M |
| AWF93617.1 protein pr | AXQ40005.1 membrane glycoprotein precursor M |
| AYI50275.1 protein pr | AXQ40005.1 protein pr |
| AYI50274.1 protein pr | ANW07475.1 protein pr |
| AYI50273.1 protein pr | AVZ47169.1 Flavivirus polyprotein propeptide |
| AXQ40007.1 protein pr | BAX00477.1 Flavivirus polyprotein propeptide |
| AXQ40006.1 protein pr | AMX81915.1 Flavivirus polyprotein propeptide |
| AXQ40004.1 protein pr | UBI73854.1 membrane glycoprotein precursor M |
| AXQ40001.1 protein pr | AXQ40005.1 Flavivirus polyprotein propeptide |
| AXQ40000.1 protein pr | AOC50653.1 protein pr |
| AXQ39999.1 protein pr | AMR39834.1 Flavivirus polyprotein propeptide |
| AXQ39998.1 protein pr | AWH65848.1 Flavivirus polyprotein propeptide |
| AXQ39997.1 protein pr | ANC90427.1 small envelope protein M |
| QFZ95661.1 protein pr | ANW07477.1 small envelope protein M |
| QGA67056.1 protein pr | ANW07474.2 small envelope protein M |
| QGA67055.1 protein pr | ARM59240.1 small envelope protein M |
| QGA67054.1 protein pr | AVW85863.1 small envelope protein M |
| QGA67053.1 protein pr | AVW85862.1 small envelope protein M |
| QGA67052.1 protein pr | AVW85861.1 small envelope protein M |
| QGA67051.1 protein pr | AVW85860.1 small envelope protein M |
| QGA67050.1 protein pr | AVW85859.1 small envelope protein M |
| QKU35968.1 protein pr | AVW85857.1 small envelope protein M |
| UED15620.1 protein pr | AVW85856.1 small envelope protein M |
| UHI99867.1 protein pr | AVW85855.1 small envelope protein M |
| UHI99866.1 protein pr | AVW85854.1 small envelope protein M |
| UHI99865.1 protein pr | AVW85853.1 small envelope protein M |
| YP_009428568.1 protein pr | AVW85852.1 small envelope protein M |
| ALU33341.1 Flavivirus polyprotein propeptide | AVW85851.1 small envelope protein M |
| AMB18850.1 Flavivirus polyprotein propeptide | AVW85850.1 small envelope protein M |
| AMM39806.1 Flavivirus polyprotein propeptide | AVW85849.1 small envelope protein M |
| ANA12599.1 Flavivirus polyprotein propeptide | AVW85848.1 small envelope protein M |
| ANB66182.1 Flavivirus polyprotein propeptide | AVW85847.1 small envelope protein M |
| ANC90428.1 Flavivirus polyprotein propeptide | AVW85846.1 small envelope protein M |
| ANF16414.1 Flavivirus polyprotein propeptide | AVW85845.1 small envelope protein M |
| ANK57897.1 Flavivirus polyprotein propeptide | AVW85844.1 small envelope protein M |
| ANN44857.1 Flavivirus polyprotein propeptide | AVW85843.1 small envelope protein M |
| ANW07476.1 Flavivirus polyprotein propeptide | AVW85842.1 small envelope protein M |
| AOG18296.1 Flavivirus polyprotein propeptide | AVW85841.1 small envelope protein M |
| AND01116.2 Flavivirus polyprotein propeptide | AVW85840.1 small envelope protein M |
| APC60216.2 Flavivirus polyprotein propeptide | AVW85839.1 small envelope protein M |
| APH11492.1 Flavivirus polyprotein propeptide | AVW85838.1 small envelope protein M |
| AMM43326.1 Flavivirus polyprotein propeptide | AVW85837.1 small envelope protein M |
| AMM43325.1 Flavivirus polyprotein propeptide | AVW85836.1 small envelope protein M |
| APO36913.1 Flavivirus polyprotein propeptide | AVW85835.1 small envelope protein M |
| AOO19564.1 Flavivirus polyprotein propeptide | AVW85834.1 small envelope protein M |
| AQV07165.1 Flavivirus polyprotein propeptide | AVW85833.1 small envelope protein M |
| AQW43708.1 Flavivirus polyprotein propeptide | AVW85832.1 small envelope protein M |
| AQW43707.1 Flavivirus polyprotein propeptide | AVW85831.1 small envelope protein M |
| AQZ41955.1 Flavivirus polyprotein propeptide | AVW85830.1 small envelope protein M |
| AQZ41953.1 Flavivirus polyprotein propeptide | AVW85829.1 small envelope protein M |
| AQZ41952.1 Flavivirus polyprotein propeptide | AVW85828.1 small envelope protein M |
| AQZ41949.1 Flavivirus polyprotein propeptide | AVW85827.1 small envelope protein M |
| ARM59239.1 Flavivirus polyprotein propeptide | AVW85826.1 small envelope protein M |
| AVG19275.1 Flavivirus polyprotein propeptide | AVW85825.1 small envelope protein M |
| AWF93619.1 Flavivirus polyprotein propeptide | AVW85824.1 small envelope protein M |
| AWF93618.1 Flavivirus polyprotein propeptide | AVW85823.1 small envelope protein M |
| AWF93617.1 Flavivirus polyprotein propeptide | AVW85822.1 small envelope protein M |
| AWH65849.1 Flavivirus polyprotein propeptide | AVW85820.1 small envelope protein M |
| ARU07076.1 Flavivirus polyprotein propeptide | AVW85819.1 small envelope protein M |
| ARU07075.1 Flavivirus polyprotein propeptide | AVW85818.1 small envelope protein M |
| ARU07074.1 Flavivirus polyprotein propeptide | AVW85816.1 small envelope protein M |
| AXF50052.1 Flavivirus polyprotein propeptide | AVW85815.1 small envelope protein M |
| AXF50016.1 Flavivirus polyprotein propeptide | AVW85814.1 small envelope protein M |
| AXF50014.1 Flavivirus polyprotein propeptide | AVW85813.1 small envelope protein M |
| AYI50275.1 Flavivirus polyprotein propeptide | AVW85810.1 small envelope protein M |
| AYI50274.1 Flavivirus polyprotein propeptide | AVW85809.1 small envelope protein M |
| AYI50273.1 Flavivirus polyprotein propeptide | AVW85808.1 small envelope protein M |
| ATB53754.1 Flavivirus polyprotein propeptide | AVW85806.1 small envelope protein M |
| AYV74937.1 Flavivirus polyprotein propeptide | AVW85805.1 small envelope protein M |
| AYV74936.1 Flavivirus polyprotein propeptide | AVW85804.1 small envelope protein M |
| AYV74935.1 Flavivirus polyprotein propeptide | AVW85802.1 small envelope protein M |
| AYV74934.1 Flavivirus polyprotein propeptide | AVW85801.1 small envelope protein M |
| AYV74933.1 Flavivirus polyprotein propeptide | AVW85800.1 small envelope protein M |
| AYV74932.1 Flavivirus polyprotein propeptide | AWF93635.1 small envelope protein M |
| AYV74931.1 Flavivirus polyprotein propeptide | AWF93634.1 small envelope protein M |
| AYV74930.1 Flavivirus polyprotein propeptide | AWF93633.1 small envelope protein M |
| AYV74929.1 Flavivirus polyprotein propeptide | AWF93632.1 small envelope protein M |
| AYV74928.1 Flavivirus polyprotein propeptide | AWF93631.1 small envelope protein M |
| AYV74927.1 Flavivirus polyprotein propeptide | AWF93630.1 small envelope protein M |
| AYV74925.1 Flavivirus polyprotein propeptide | AWF93629.1 small envelope protein M |
| AYV74924.1 Flavivirus polyprotein propeptide | AWF93628.1 small envelope protein M |
| AYV74923.1 Flavivirus polyprotein propeptide | AWF93627.1 small envelope protein M |
| AYV74922.1 Flavivirus polyprotein propeptide | AWF93626.1 small envelope protein M |
| AYV74921.1 Flavivirus polyprotein propeptide | AWF93625.1 small envelope protein M |
| AYV74920.1 Flavivirus polyprotein propeptide | AWF93624.1 small envelope protein M |
| AYV74919.1 Flavivirus polyprotein propeptide | AWF93623.1 small envelope protein M |
| AYV74918.1 Flavivirus polyprotein propeptide | AWF93622.1 small envelope protein M |
| AYV74917.1 Flavivirus polyprotein propeptide | AWF93621.1 small envelope protein M |
| AYV74916.1 Flavivirus polyprotein propeptide | AWF93620.1 small envelope protein M |
| QCG74166.1 Flavivirus polyprotein propeptide | YP_002790881.1 membrane glycoprotein M |
| YP_009428568.1 Flavivirus polyprotein propeptide | YP_009227208.1 membrane glycoprotein M |
| YP_009430297.1 Flavivirus polyprotein propeptide | BAP47441.1 Flavivirus envelope glycoprotein M |
| AMC13911.1 Flavivirus polyprotein propeptide | AMR39836.1 Flavivirus envelope glycoprotein M |
| AMB37295.1 Flavivirus polyprotein propeptide | AMR39835.1 Flavivirus envelope glycoprotein M |
| AMD16557.1 Flavivirus polyprotein propeptide | AMR39833.1 Flavivirus envelope glycoprotein M |
| AMK79469.1 Flavivirus polyprotein propeptide | ANW07477.1 Flavivirus envelope glycoprotein M |
| AMN14619.1 Flavivirus polyprotein propeptide | AOR51315.1 Flavivirus envelope glycoprotein M |
| AMQ34004.1 Flavivirus polyprotein propeptide | ARM59240.1 Flavivirus envelope glycoprotein M |
| AMQ34003.1 Flavivirus polyprotein propeptide | AVW85863.1 Flavivirus envelope glycoprotein M |
| AMQ48982.1 Flavivirus polyprotein propeptide | AVW85862.1 Flavivirus envelope glycoprotein M |
| AMQ48981.1 Flavivirus polyprotein propeptide | AVW85861.1 Flavivirus envelope glycoprotein M |
| AMQ48986.1 Flavivirus polyprotein propeptide | AVW85860.1 Flavivirus envelope glycoprotein M |
| AMX81919.1 Flavivirus polyprotein propeptide | AVW85859.1 Flavivirus envelope glycoprotein M |
| AXQ39996.1 Flavivirus polyprotein propeptide | AVW85857.1 Flavivirus envelope glycoprotein M |
| AHZ13508.1 Flavivirus polyprotein propeptide | AVW85856.1 Flavivirus envelope glycoprotein M |
| AMH87239.1 Flavivirus polyprotein propeptide | AVW85855.1 Flavivirus envelope glycoprotein M |
| AMN14620.1 Flavivirus polyprotein propeptide | AVW85854.1 Flavivirus envelope glycoprotein M |
| ANB66183.1 Flavivirus polyprotein propeptide | AVW85853.1 Flavivirus envelope glycoprotein M |
| ANG09399.1 Flavivirus polyprotein propeptide | AVW85852.1 Flavivirus envelope glycoprotein M |
| ANH10698.1 Flavivirus polyprotein propeptide | AVW85851.1 Flavivirus envelope glycoprotein M |
| ANZ46736.1 Flavivirus polyprotein propeptide | AVW85850.1 Flavivirus envelope glycoprotein M |
| AOR82893.1 Flavivirus polyprotein propeptide | AVW85849.1 Flavivirus envelope glycoprotein M |
| AOR82892.1 Flavivirus polyprotein propeptide | AVW85848.1 Flavivirus envelope glycoprotein M |
| BAV82373.1 Flavivirus polyprotein propeptide | AVW85847.1 Flavivirus envelope glycoprotein M |
| ANH22038.1 Flavivirus polyprotein propeptide | AVW85846.1 Flavivirus envelope glycoprotein M |
| APO08503.1 Flavivirus polyprotein propeptide | AVW85845.1 Flavivirus envelope glycoprotein M |
| AQZ41956.1 Flavivirus polyprotein propeptide | AVW85844.1 Flavivirus envelope glycoprotein M |
| AQZ41954.1 Flavivirus polyprotein propeptide | AVW85843.1 Flavivirus envelope glycoprotein M |
| AQZ41951.1 Flavivirus polyprotein propeptide | AVW85842.1 Flavivirus envelope glycoprotein M |
| AQZ41950.1 Flavivirus polyprotein propeptide | AVW85841.1 Flavivirus envelope glycoprotein M |
| AQZ41948.1 Flavivirus polyprotein propeptide | AVW85840.1 Flavivirus envelope glycoprotein M |
| AQZ41947.1 Flavivirus polyprotein propeptide | AVW85839.1 Flavivirus envelope glycoprotein M |
| APW84877.1 Flavivirus polyprotein propeptide | AVW85838.1 Flavivirus envelope glycoprotein M |
| APW84876.1 Flavivirus polyprotein propeptide | AVW85837.1 Flavivirus envelope glycoprotein M |
| APW84875.1 Flavivirus polyprotein propeptide | AVW85836.1 Flavivirus envelope glycoprotein M |
| APW84874.1 Flavivirus polyprotein propeptide | AVW85835.1 Flavivirus envelope glycoprotein M |
| APW84873.1 Flavivirus polyprotein propeptide | AVW85834.1 Flavivirus envelope glycoprotein M |
| APW84872.1 Flavivirus polyprotein propeptide | AVW85833.1 Flavivirus envelope glycoprotein M |
| ASB32509.1 Flavivirus polyprotein propeptide | AVW85832.1 Flavivirus envelope glycoprotein M |
| ASF57880.1 Flavivirus polyprotein propeptide | AVW85831.1 Flavivirus envelope glycoprotein M |
| ATB53752.1 Flavivirus polyprotein propeptide | AVW85830.1 Flavivirus envelope glycoprotein M |
| ARB08102.1 Flavivirus polyprotein propeptide | AVW85829.1 Flavivirus envelope glycoprotein M |
| AXF50015.1 Flavivirus polyprotein propeptide | AVW85828.1 Flavivirus envelope glycoprotein M |
| ATB53753.1 Flavivirus polyprotein propeptide | AVW85827.1 Flavivirus envelope glycoprotein M |
| AXQ40007.1 Flavivirus polyprotein propeptide | AVW85826.1 Flavivirus envelope glycoprotein M |
| AXQ40006.1 Flavivirus polyprotein propeptide | AVW85825.1 Flavivirus envelope glycoprotein M |
| AXQ40004.1 Flavivirus polyprotein propeptide | AVW85824.1 Flavivirus envelope glycoprotein M |
| AXQ40003.1 Flavivirus polyprotein propeptide | AVW85823.1 Flavivirus envelope glycoprotein M |
| AXQ40001.1 Flavivirus polyprotein propeptide | AVW85822.1 Flavivirus envelope glycoprotein M |
| AXQ40000.1 Flavivirus polyprotein propeptide | AVW85820.1 Flavivirus envelope glycoprotein M |
| AXQ39999.1 Flavivirus polyprotein propeptide | AVW85819.1 Flavivirus envelope glycoprotein M |
| AXQ39998.1 Flavivirus polyprotein propeptide | AVW85818.1 Flavivirus envelope glycoprotein M |
| AXQ39997.1 Flavivirus polyprotein propeptide | AVW85816.1 Flavivirus envelope glycoprotein M |
| QDZ58856.1 Flavivirus polyprotein propeptide | AVW85815.1 Flavivirus envelope glycoprotein M |
| QDZ58855.1 Flavivirus polyprotein propeptide | AVW85814.1 Flavivirus envelope glycoprotein M |
| QDZ58854.1 Flavivirus polyprotein propeptide | AVW85813.1 Flavivirus envelope glycoprotein M |
| QFZ95661.1 Flavivirus polyprotein propeptide | AVW85810.1 Flavivirus envelope glycoprotein M |
| QGA67056.1 Flavivirus polyprotein propeptide | AVW85809.1 Flavivirus envelope glycoprotein M |
| QGA67055.1 Flavivirus polyprotein propeptide | AVW85808.1 Flavivirus envelope glycoprotein M |
| QGA67054.1 Flavivirus polyprotein propeptide | AVW85806.1 Flavivirus envelope glycoprotein M |
| QGA67053.1 Flavivirus polyprotein propeptide | AVW85805.1 Flavivirus envelope glycoprotein M |
| QGA67052.1 Flavivirus polyprotein propeptide | AVW85804.1 Flavivirus envelope glycoprotein M |
| QGA67051.1 Flavivirus polyprotein propeptide | AVW85802.1 Flavivirus envelope glycoprotein M |
| QGA67050.1 Flavivirus polyprotein propeptide | AVW85801.1 Flavivirus envelope glycoprotein M |
| AZS35405.1 Flavivirus polyprotein propeptide | AVW85800.1 Flavivirus envelope glycoprotein M |
| AZS35404.1 Flavivirus polyprotein propeptide | AWF93635.1 Flavivirus envelope glycoprotein M |
| AZS35403.1 Flavivirus polyprotein propeptide | AWF93634.1 Flavivirus envelope glycoprotein M |
| QBM11757.1 Flavivirus polyprotein propeptide | AWF93633.1 Flavivirus envelope glycoprotein M |
| QKU35968.1 Flavivirus polyprotein propeptide | AWF93632.1 Flavivirus envelope glycoprotein M |
| QKX95861.1 Flavivirus polyprotein propeptide | AWF93631.1 Flavivirus envelope glycoprotein M |
| QLI34051.1 Flavivirus polyprotein propeptide | AWF93630.1 Flavivirus envelope glycoprotein M |
| QTA38994.1 Flavivirus polyprotein propeptide | AWF93629.1 Flavivirus envelope glycoprotein M |
| QTA38993.1 Flavivirus polyprotein propeptide | AWF93628.1 Flavivirus envelope glycoprotein M |
| UED15620.1 Flavivirus polyprotein propeptide | AWF93627.1 Flavivirus envelope glycoprotein M |
| UHI99866.1 Flavivirus polyprotein propeptide | AWF93626.1 Flavivirus envelope glycoprotein M |
| UHI99865.1 Flavivirus polyprotein propeptide | AWF93625.1 Flavivirus envelope glycoprotein M |
| AMQ34004.1 membrane glycoprotein M | AWF93624.1 Flavivirus envelope glycoprotein M |
| AMQ48982.1 membrane glycoprotein M | AWF93623.1 Flavivirus envelope glycoprotein M |
| AMQ48981.1 membrane glycoprotein M | AWF93622.1 Flavivirus envelope glycoprotein M |
| ANB66184.1 small envelope protein M | AWF93621.1 Flavivirus envelope glycoprotein M |
| ANB66183.1 small envelope protein M | AWF93620.1 Flavivirus envelope glycoprotein M |
| ANB66182.1 small envelope protein M | AUY62553.1 Flavivirus envelope glycoprotein M |
| ANC90428.1 small envelope protein M | ASR91936.1 Flavivirus envelope glycoprotein M |
| ANN83273.1 small envelope protein M | AYU74865.1 Flavivirus envelope glycoprotein M |
| ANN83272.1 small envelope protein M | YP_009227208.1 Flavivirus envelope glycoprotein M |
| ANW07476.1 small envelope protein M | YP_009227197.1 Flavivirus envelope glycoprotein M |
| ANW07475.1 small envelope protein M | UBI73854.1 Flavivirus polyprotein propeptide |
| AOC50654.1 small envelope protein M | AVW85817.1 small envelope protein M |
| AOC50653.1 small envelope protein M | AVW85821.1 small envelope protein M |
| AOC50652.1 small envelope protein M | AVW85812.1 small envelope protein M |
| AOO19564.1 membrane glycoprotein M | AVW85811.1 small envelope protein M |
| AQV07165.1 small envelope protein M | AVW85803.1 small envelope protein M |
| AQZ41956.1 small envelope protein M | AVW85858.1 small envelope protein M |
| AQZ41955.1 small envelope protein M | AVW85807.1 small envelope protein M |
| AQZ41954.1 small envelope protein M | UBI73854.1 protein pr |
| AQZ41953.1 small envelope protein M | AVW85817.1 Flavivirus envelope glycoprotein M |
| AQZ41952.1 small envelope protein M | AVW85821.1 Flavivirus envelope glycoprotein M |
| AQZ41951.1 small envelope protein M | AVW85812.1 Flavivirus envelope glycoprotein M |
| AQZ41950.1 small envelope protein M | AVW85811.1 Flavivirus envelope glycoprotein M |
| AQZ41949.1 small envelope protein M | AVW85803.1 Flavivirus envelope glycoprotein M |
| AQZ41948.1 small envelope protein M | AVW85858.1 Flavivirus envelope glycoprotein M |
| AQZ41947.1 small envelope protein M | AVW85807.1 Flavivirus envelope glycoprotein M |
| AWF93619.1 small envelope protein M | YP_009227197.1 membrane glycoprotein precursor M |
| AWF93618.1 small envelope protein M | AOR51315.1 Flavivirus polyprotein propeptide |
| AWF93617.1 small envelope protein M | ARM59240.1 Flavivirus polyprotein propeptide |
| AYI50275.1 small envelope protein M | AVW85863.1 Flavivirus polyprotein propeptide |
| AYI50274.1 small envelope protein M | AVW85861.1 Flavivirus polyprotein propeptide |
| AYI50273.1 small envelope protein M | AVW85859.1 Flavivirus polyprotein propeptide |
| AXQ40007.1 membrane glycoprotein M | AVW85857.1 Flavivirus polyprotein propeptide |
| AXQ40006.1 membrane glycoprotein M | AVW85856.1 Flavivirus polyprotein propeptide |
| AXQ40004.1 membrane glycoprotein M | AVW85855.1 Flavivirus polyprotein propeptide |
| AXQ40003.1 membrane glycoprotein M | AVW85853.1 Flavivirus polyprotein propeptide |
| AXQ40002.1 membrane glycoprotein M | AVW85852.1 Flavivirus polyprotein propeptide |
| AXQ40001.1 membrane glycoprotein M | AVW85851.1 Flavivirus polyprotein propeptide |
| AXQ40000.1 membrane glycoprotein M | AVW85848.1 Flavivirus polyprotein propeptide |
| AXQ39998.1 membrane glycoprotein M | AVW85847.1 Flavivirus polyprotein propeptide |
| AXQ39997.1 membrane glycoprotein M | AVW85845.1 Flavivirus polyprotein propeptide |
| AXQ39996.1 membrane glycoprotein M | AVW85843.1 Flavivirus polyprotein propeptide |
| QFZ95661.1 membrane glycoprotein M | AVW85837.1 Flavivirus polyprotein propeptide |
| QGA67056.1 membrane glycoprotein M | AVW85836.1 Flavivirus polyprotein propeptide |
| QGA67055.1 membrane glycoprotein M | AVW85835.1 Flavivirus polyprotein propeptide |
| QGA67054.1 membrane glycoprotein M | AVW85831.1 Flavivirus polyprotein propeptide |
| QGA67053.1 membrane glycoprotein M | AVW85830.1 Flavivirus polyprotein propeptide |
| QGA67052.1 membrane glycoprotein M | AVW85828.1 Flavivirus polyprotein propeptide |
| QGA67051.1 membrane glycoprotein M | AVW85827.1 Flavivirus polyprotein propeptide |
| QGA67050.1 membrane glycoprotein M | AVW85824.1 Flavivirus polyprotein propeptide |
| QGA72951.1 membrane glycoprotein M | AVW85823.1 Flavivirus polyprotein propeptide |
| QKM77299.1 membrane glycoprotein M | AVW85822.1 Flavivirus polyprotein propeptide |
| QKU35968.1 membrane glycoprotein M | AVW85821.1 Flavivirus polyprotein propeptide |
| QOF88708.1 membrane glycoprotein M | AVW85820.1 Flavivirus polyprotein propeptide |
| QKF93441.1 membrane glycoprotein M | AVW85819.1 Flavivirus polyprotein propeptide |
| QKF93440.1 membrane glycoprotein M | AVW85818.1 Flavivirus polyprotein propeptide |
| QKF93439.1 membrane glycoprotein M | AVW85817.1 Flavivirus polyprotein propeptide |
| QKF93438.1 membrane glycoprotein M | AVW85816.1 Flavivirus polyprotein propeptide |
| QKF93437.1 membrane glycoprotein M | AVW85815.1 Flavivirus polyprotein propeptide |
| QKF93436.1 membrane glycoprotein M | AVW85814.1 Flavivirus polyprotein propeptide |
| QKF93435.1 membrane glycoprotein M | AVW85813.1 Flavivirus polyprotein propeptide |
| QKF93434.1 membrane glycoprotein M | AVW85812.1 Flavivirus polyprotein propeptide |
| QKF93433.1 membrane glycoprotein M | AVW85811.1 Flavivirus polyprotein propeptide |
| QKF93430.1 membrane glycoprotein M | AVW85809.1 Flavivirus polyprotein propeptide |
| QKF93429.1 membrane glycoprotein M | AVW85808.1 Flavivirus polyprotein propeptide |
| QKF93428.1 membrane glycoprotein M | AVW85806.1 Flavivirus polyprotein propeptide |
| UBI73854.1 membrane glycoprotein M | AVW85805.1 Flavivirus polyprotein propeptide |
| UED15620.1 membrane glycoprotein M | AVW85804.1 Flavivirus polyprotein propeptide |
| UHI99867.1 membrane glycoprotein M | AVW85803.1 Flavivirus polyprotein propeptide |
| UHI99866.1 membrane glycoprotein M | AVW85802.1 Flavivirus polyprotein propeptide |
| UHI99865.1 membrane glycoprotein M | AVW85800.1 Flavivirus polyprotein propeptide |
| YP_009428568.1 membrane glycoprotein M | AWF93635.1 Flavivirus polyprotein propeptide |
| YP_009430299.1 membrane glycoprotein M | AWF93634.1 Flavivirus polyprotein propeptide |
| ALU33341.1 Flavivirus envelope glycoprotein M | AWF93633.1 Flavivirus polyprotein propeptide |
| AMC13911.1 Flavivirus envelope glycoprotein M | AWF93632.1 Flavivirus polyprotein propeptide |
| AMB37295.1 Flavivirus envelope glycoprotein M | AWF93629.1 Flavivirus polyprotein propeptide |
| AMD61710.1 Flavivirus envelope glycoprotein M | AWF93627.1 Flavivirus polyprotein propeptide |
| AMB18850.1 Flavivirus envelope glycoprotein M | AWF93626.1 Flavivirus polyprotein propeptide |
| AMD16557.1 Flavivirus envelope glycoprotein M | AWF93625.1 Flavivirus polyprotein propeptide |
| AMK79469.1 Flavivirus envelope glycoprotein M | AWF93624.1 Flavivirus polyprotein propeptide |
| AMM39806.1 Flavivirus envelope glycoprotein M | AWF93622.1 Flavivirus polyprotein propeptide |
| AMN14619.1 Flavivirus envelope glycoprotein M | AWF93621.1 Flavivirus polyprotein propeptide |
| AMQ34004.1 Flavivirus envelope glycoprotein M | AWF93620.1 Flavivirus polyprotein propeptide |
| AMQ48982.1 Flavivirus envelope glycoprotein M | AUY62553.1 Flavivirus polyprotein propeptide |
| AMQ48981.1 Flavivirus envelope glycoprotein M | ASR91936.1 Flavivirus polyprotein propeptide |
| AMX81919.1 Flavivirus envelope glycoprotein M | AYU74865.1 Flavivirus polyprotein propeptide |
| ANA12599.1 Flavivirus envelope glycoprotein M | BAP47441.1 Flavivirus polyprotein propeptide |
| ANB66182.1 Flavivirus envelope glycoprotein M | AMR39836.1 Flavivirus polyprotein propeptide |
| ANC90428.1 Flavivirus envelope glycoprotein M | AMR39835.1 Flavivirus polyprotein propeptide |
| ANF16414.1 Flavivirus envelope glycoprotein M | AMR39833.1 Flavivirus polyprotein propeptide |
| ANK57897.1 Flavivirus envelope glycoprotein M | ANW07477.1 Flavivirus polyprotein propeptide |
| AOG18296.1 Flavivirus envelope glycoprotein M | YP_009227197.1 Flavivirus polyprotein propeptide |
| AND01116.2 Flavivirus envelope glycoprotein M | ANC90427.1 protein pr |
| APC60216.2 Flavivirus envelope glycoprotein M | ANW07477.1 protein pr |
| APH11492.1 Flavivirus envelope glycoprotein M | ANW07474.2 protein pr |
| AMM43326.1 Flavivirus envelope glycoprotein M | ARM59240.1 protein pr |
| AMM43325.1 Flavivirus envelope glycoprotein M | AVW85863.1 protein pr |
| APO36913.1 Flavivirus envelope glycoprotein M | AVW85861.1 protein pr |
| AOO19564.1 Flavivirus envelope glycoprotein M | AVW85859.1 protein pr |
| AQV07165.1 Flavivirus envelope glycoprotein M | AVW85857.1 protein pr |
| AQW43707.1 Flavivirus envelope glycoprotein M | AVW85856.1 protein pr |
| AQZ41955.1 Flavivirus envelope glycoprotein M | AVW85855.1 protein pr |
| AQZ41953.1 Flavivirus envelope glycoprotein M | AVW85853.1 protein pr |
| AQZ41952.1 Flavivirus envelope glycoprotein M | AVW85852.1 protein pr |
| AQZ41949.1 Flavivirus envelope glycoprotein M | AVW85851.1 protein pr |
| AMX81917.1 Flavivirus envelope glycoprotein M | AVW85848.1 protein pr |
| AMX81916.1 Flavivirus envelope glycoprotein M | AVW85847.1 protein pr |
| AMX81915.1 Flavivirus envelope glycoprotein M | AVW85845.1 protein pr |
| ARM59239.1 Flavivirus envelope glycoprotein M | AVW85843.1 protein pr |
| AQS26698.1 Flavivirus envelope glycoprotein M | AVW85837.1 protein pr |
| AUI42330.1 Flavivirus envelope glycoprotein M | AVW85836.1 protein pr |
| AUI42329.1 Flavivirus envelope glycoprotein M | AVW85835.1 protein pr |
| BBC70847.1 Flavivirus envelope glycoprotein M | AVW85831.1 protein pr |
| AVZ47169.1 Flavivirus envelope glycoprotein M | AVW85830.1 protein pr |
| AWF93619.1 Flavivirus envelope glycoprotein M | AVW85828.1 protein pr |
| AWF93618.1 Flavivirus envelope glycoprotein M | AVW85827.1 protein pr |
| AWF93617.1 Flavivirus envelope glycoprotein M | AVW85824.1 protein pr |
| AWH65849.1 Flavivirus envelope glycoprotein M | AVW85823.1 protein pr |
| ARU07076.1 Flavivirus envelope glycoprotein M | AVW85822.1 protein pr |
| ARU07075.1 Flavivirus envelope glycoprotein M | AVW85821.1 protein pr |
| ARU07074.1 Flavivirus envelope glycoprotein M | AVW85820.1 protein pr |
| AVV62004.1 Flavivirus envelope glycoprotein M | AVW85819.1 protein pr |
| AVG19203.1 Flavivirus envelope glycoprotein M | AVW85818.1 protein pr |
| AVG19202.1 Flavivirus envelope glycoprotein M | AVW85817.1 protein pr |
| AUF35022.1 Flavivirus envelope glycoprotein M | AVW85816.1 protein pr |
| AUF35021.1 Flavivirus envelope glycoprotein M | AVW85815.1 protein pr |
| AXF50052.1 Flavivirus envelope glycoprotein M | AVW85814.1 protein pr |
| AXF50016.1 Flavivirus envelope glycoprotein M | AVW85813.1 protein pr |
| AXF50014.1 Flavivirus envelope glycoprotein M | AVW85812.1 protein pr |
| AYI50275.1 Flavivirus envelope glycoprotein M | AVW85811.1 protein pr |
| AYI50274.1 Flavivirus envelope glycoprotein M | AVW85809.1 protein pr |
| AYI50273.1 Flavivirus envelope glycoprotein M | AVW85808.1 protein pr |
| AVC63698.1 Flavivirus envelope glycoprotein M | AVW85806.1 protein pr |
| AVC63697.1 Flavivirus envelope glycoprotein M | AVW85805.1 protein pr |
| ATB53754.1 Flavivirus envelope glycoprotein M | AVW85804.1 protein pr |
| AYV74931.1 Flavivirus envelope glycoprotein M | AVW85803.1 protein pr |
| AYV74930.1 Flavivirus envelope glycoprotein M | AVW85802.1 protein pr |
| AYV74929.1 Flavivirus envelope glycoprotein M | AVW85800.1 protein pr |
| AYV74928.1 Flavivirus envelope glycoprotein M | AWF93635.1 protein pr |
| AYV74927.1 Flavivirus envelope glycoprotein M | AWF93634.1 protein pr |
| AYV74925.1 Flavivirus envelope glycoprotein M | AWF93633.1 protein pr |
| AYV74924.1 Flavivirus envelope glycoprotein M | AWF93632.1 protein pr |
| AYV74923.1 Flavivirus envelope glycoprotein M | AWF93629.1 protein pr |
| AYV74922.1 Flavivirus envelope glycoprotein M | AWF93627.1 protein pr |
| AYV74921.1 Flavivirus envelope glycoprotein M | AWF93626.1 protein pr |
| AYV74920.1 Flavivirus envelope glycoprotein M | AWF93625.1 protein pr |
| AYV74919.1 Flavivirus envelope glycoprotein M | AWF93624.1 protein pr |
| AYV74918.1 Flavivirus envelope glycoprotein M | AWF93622.1 protein pr |
| AYV74917.1 Flavivirus envelope glycoprotein M | AWF93621.1 protein pr |
| AYV74916.1 Flavivirus envelope glycoprotein M | AWF93620.1 protein pr |
| YP_009428568.1 Flavivirus envelope glycoprotein M | YP_002790881.1 protein pr |
| YP_009430297.1 Flavivirus envelope glycoprotein M | AAV34151.1 Flavivirus polyprotein propeptide |
| AXQ40002.1 membrane glycoprotein precursor M | AMR39832.1 Flavivirus polyprotein propeptide |
| AXQ40003.1 membrane glycoprotein precursor M | ANW07474.2 Flavivirus polyprotein propeptide |
| QGA72951.1 membrane glycoprotein precursor M | AUY62552.1 Flavivirus polyprotein propeptide |
| QKF93440.1 membrane glycoprotein precursor M | QDH45910.1 Flavivirus polyprotein propeptide |
| QKF93438.1 membrane glycoprotein precursor M | QPC45464.1 Flavivirus polyprotein propeptide |
| QKF93437.1 membrane glycoprotein precursor M | YP_002790881.1 Flavivirus polyprotein propeptide |
| QKF93436.1 membrane glycoprotein precursor M | AVW85862.1 Flavivirus polyprotein propeptide |
| QKF93435.1 membrane glycoprotein precursor M | AVW85860.1 Flavivirus polyprotein propeptide |
| QKF93434.1 membrane glycoprotein precursor M | AVW85858.1 Flavivirus polyprotein propeptide |
| QKF93433.1 membrane glycoprotein precursor M | AVW85854.1 Flavivirus polyprotein propeptide |
| QKF93430.1 membrane glycoprotein precursor M | AVW85850.1 Flavivirus polyprotein propeptide |
| QKF93429.1 membrane glycoprotein precursor M | AVW85849.1 Flavivirus polyprotein propeptide |
| QKF93428.1 membrane glycoprotein precursor M | AVW85846.1 Flavivirus polyprotein propeptide |
| QKM77299.1 membrane glycoprotein precursor M | AVW85844.1 Flavivirus polyprotein propeptide |
| AXQ39996.1 membrane glycoprotein precursor M | AVW85842.1 Flavivirus polyprotein propeptide |
| AXQ39999.1 membrane glycoprotein precursor M | AVW85841.1 Flavivirus polyprotein propeptide |
| QOF88708.1 membrane glycoprotein precursor M | AVW85840.1 Flavivirus polyprotein propeptide |
| QKF93441.1 membrane glycoprotein precursor M | AVW85839.1 Flavivirus polyprotein propeptide |
| QKF93439.1 membrane glycoprotein precursor M | AVW85838.1 Flavivirus polyprotein propeptide |
| AXQ40002.1 protein pr | AVW85834.1 Flavivirus polyprotein propeptide |
| AXQ40003.1 protein pr | AVW85833.1 Flavivirus polyprotein propeptide |
| AOC50652.1 protein pr | AVW85832.1 Flavivirus polyprotein propeptide |
| QGA72951.1 protein pr | AVW85829.1 Flavivirus polyprotein propeptide |
| QKF93440.1 protein pr | AVW85826.1 Flavivirus polyprotein propeptide |
| QKF93438.1 protein pr | AVW85825.1 Flavivirus polyprotein propeptide |
| QKF93437.1 protein pr | AVW85810.1 Flavivirus polyprotein propeptide |
| QKF93436.1 protein pr | AVW85807.1 Flavivirus polyprotein propeptide |
| QKF93435.1 protein pr | AVW85801.1 Flavivirus polyprotein propeptide |
| QKF93434.1 protein pr | AWF93631.1 Flavivirus polyprotein propeptide |
| QKF93433.1 protein pr | AWF93630.1 Flavivirus polyprotein propeptide |
| QKF93432.1 protein pr | AWF93628.1 Flavivirus polyprotein propeptide |
| QKF93431.1 protein pr | AWF93623.1 Flavivirus polyprotein propeptide |
| QKF93430.1 protein pr | AVW85862.1 protein pr |
| QKF93429.1 protein pr | AVW85860.1 protein pr |
| QKF93428.1 protein pr | AVW85858.1 protein pr |
| ANN83272.1 protein pr | AVW85854.1 protein pr |
| QKM77301.1 protein pr | AVW85850.1 protein pr |
| QKM77300.1 protein pr | AVW85849.1 protein pr |
| QKM77299.1 protein pr | AVW85846.1 protein pr |
| QKM77298.1 protein pr | AVW85844.1 protein pr |
| AXQ39996.1 protein pr | AVW85842.1 protein pr |
| QOF88708.1 protein pr | AVW85841.1 protein pr |
| QKF93441.1 protein pr | AVW85840.1 protein pr |
| QKF93439.1 protein pr | AVW85839.1 protein pr |
| AUI42330.1 Flavivirus polyprotein propeptide | AVW85838.1 protein pr |
| AUI42329.1 Flavivirus polyprotein propeptide | AVW85834.1 protein pr |
| AMD61710.1 Flavivirus polyprotein propeptide | AVW85833.1 protein pr |
| AMX81917.1 Flavivirus polyprotein propeptide | AVW85832.1 protein pr |
| AMX81916.1 Flavivirus polyprotein propeptide | AVW85829.1 protein pr |
| AQS26698.1 Flavivirus polyprotein propeptide | AVW85826.1 protein pr |
| BBC70847.1 Flavivirus polyprotein propeptide | AVW85825.1 protein pr |
| AVV62004.1 Flavivirus polyprotein propeptide | AVW85810.1 protein pr |
| AVG19203.1 Flavivirus polyprotein propeptide | AVW85807.1 protein pr |
| AVG19202.1 Flavivirus polyprotein propeptide | AVW85801.1 protein pr |
| AUF35022.1 Flavivirus polyprotein propeptide | AWF93631.1 protein pr |
| AUF35021.1 Flavivirus polyprotein propeptide | AWF93630.1 protein pr |
| AVC63698.1 Flavivirus polyprotein propeptide | AWF93628.1 protein pr |
| AVC63697.1 Flavivirus polyprotein propeptide | AWF93623.1 protein pr |

### EXAMPLES

### Example 1: In Vitro Transcription and RNA Transfection of a Construct Carrying Nluc and eGFP Construct in Vero Cell

[0408] A construct of a plasmid carrying sequences of RNA polymerase promoter, Hammer head ribozyme, 5′ UTRs, C-partial, 3′UTRs, HDV ribozyme and encoding GFP and Nluc luciferase was designed as shown generally in FIG. 5. See also Table 2.

[0409] RNA produced through in vitro transcription of linear plasmid was transfected in Vero cells. The transient transfection was carried out with Lipofectamine™ MessengerMAX™ (Thermo Scientific™ catalog #LMRNA001), after 24 hours, a fresh culture medium was added to the cells.

[0410] After 48 hours, the transfected Vero cells were imaged alive. GFP signal was detected with fluorescent microscopy (EVOS M5000 Imaging System, ThermoFisher™). As shown in FIG. 3, GFP signal was strong in a positively transfected Vero cell after GFP expression by a cytoplasmic RNA Replicon transfection.

[0411] In another experiment, Nluc luciferase activity was determined after capless RNA transfection.

[0412] In vitro transcription was carried out for the plasmid with Nluc activity. Using a kit MEGAscript (catalog #AM1330, Life Technologies), in vitro transcription was performed according to the user manuals. Briefly, 1 μg of linearized plasmid was used, and the reaction performed for 2 hours. After lithium chloride and isopropanol precipitation, RNA was resuspended in water and stored at −80° C.

[0413] The transcription products were pre-treated with Lipofectamine™ MessengerMAX™ (Thermo Scientific™ catalog #LMRNA001) under fabricant instruction conditions. Briefly, the complex of transcription products and Lipofectamine™ MessengerMAX™ were incubated with Vero cells (obtained from ATCC) and after 24 hours, a fresh culture medium was added to the cells.

[0414] Supernatant and pellet of transfected cells were resuspended in 1 volume of NanoGlo detection reagent (Promega) previously diluted 50× in water. Luminescence was quantified for 0.5 seconds in a GloMax luminometer (Promega). As shown in FIG. 6D and FIG. 6E, high Nluc activities were observed in both the cell lysate and the supernatant of the Vero cells, demonstrating a capless RNA with ZIKV 5′UTR and 3′UTR is recognized by human translation machinery.

TABLE 2
FIG. 5 sequences.

| Component | |
|---|---|
| (SEQ ID NO) | Sequence |
| Eukaryotic | gacattgattattgactagttattaatagtaatcaattacggggtcattagttcatagcccatatatggagttcc |
| enhancer (2896) | gcgttacataacttacggtaaatggcccgcctggctgaccgcccaacgacccccgcccattgacgtcaat |
| | aatgacgtatgttcccatagtaacgccaatagggactttccattgacgtcaatgggtggactatttacggtaa |
| | actgcccacttggcagtacatcaagtgtatcatatgccaagtacgccccctattgacgtcaatgacggtaa |
| | atggcccgcctggcattatgcccagtacatgaccttatgggactttcctacttggcagtacatctacgtatta |
| | gtcatcgctattaccatg |
| Eukaryotic | gtgatgcggttttggcagtacatcaatgggcgtggatagcggtttgactcacggggatttccaagtctcca |
| promoter (2897) | ccccattgacgtcaatgggagtttgttttggcaccaaaatcaacgggactttccaaaatgtcgtaacaactc |
| | cgccccattgacgcaaatgggcggtaggcgtgtacggtgggaggtctatataagcagagct |
| RNA | taatacgactcactatagg |
| polymerase | |
| promoter (2898) | |
| Hammer head | gttaacacaactctgatgagtccgtgaggacgaaacgagtaagctcgtc |
| (2899) | |
| 5′ zika UTR | agttgttactgttgctgactcagactgcgacagttcgagtttgaagcgaaagctagcaacagtatcaacag |
| (2900) | gttttatttggatttggaaacgagagtttctggtc |
| C Zika (2901) | atgaaaaacccaaaaaagaaatccggaggattccggattgtcaatatgctaaaacgcggagtagcccgt |
| | gtgagcccctttgggggcttg |
| EGFP (2902) | atggtgagcaagggcgaggagctgttcaccggggtggtgcccatcctggtcgagctggacggcgacgt |
| | aaacggccacaagttcagcgtgtccggcgagggcgagggcgatgccacctacggcaagctgaccctg |
| | aagttcatctgcaccaccggcaagctgcccgtgccctggcccaccctcgtgaccaccctgacctacggc |
| | gtgcagtgcttcagccgctaccccgaccacatgaagcagcacgacttcttcaagtccgccatgcccgaa |
| | ggctacgtccaggagcgcaccatcttcttcaaggacgacggcaactacaagacccgcgccgaggtgaa |
| | gttcgagggcgacaccctggtgaaccgcatcgagctgaagggcatcgacttcaaggaggacggcaac |
| | atcctggggcacaagctggagtacaactacaacagccacaacgtctatatcatggccgacaagcagaag |
| | aacggcatcaaggtgaacttcaagatccgccacaacatcgaggacggcagcgtgcagctcgccgacca |
| | ctaccagcagaacacccccatcggcgacggccccgtgctgctgcccgacaaccactacctgagcaccc |
| | agtccgccctgagcaaagaccccaacgagaagcgcgatcacatggtcctgctggagttcgtgaccgcc |
| | gccgggatcactctcggcatggacgagctgtacaag |
| Nluc (2903) | gtcttcacactcgaagatttcgttggggactggcgacagacagccggctacaacctggaccaagtccttg |
| | aacagggaggtgtgtccagtttgtttcagaatctcggggtgtccgtaactccgatccaaaggattgtcctga |
| | gcggtgaaaatgggctgaagatcgacatccatgtcatcatcccgtatgaaggtctgagcggcgaccaaat |
| | gggccagatcgaaaaaatttttaaggtggtgtaccctgtggatgatcatcactttaaggtgatcctgcactat |
| | ggcacactggtaatcgacggggttacgccgaacatgatcgactatttcggacggccgtatgaaggcatc |
| | gccgtgttcgacggcaaaaagatcactgtaacagggaccctgtggaacggcaacaaaattatcgacgag |
| | cgcctgatcaaccccgacggctccctgctgttccgagtaaccatcaacggagtgaccggctggcggctg |
| | tgcgaacgcattctggcg |
| 6xHis (2904) | catcatcaccatcaccac |
| 3′ zika UTR | gcaccaatcttaatgttgtcaggcctgctagtcagccacagcttggggaaagctgtgcagcctgtgaccc |
| (2905) | ccccaggagaagctgggaaaccaagcctatagtcaggccgagaacgccatggcacggaagaagccat |
| | gctgcctgtgagcccctcagaggacactgagtcaaaaaaccccacgcgcttggaggcgcaggatggg |
| | aaaagaaggtggcgaccttccccacccttcaatctggggcctgaactggagatcagctgtggatctccag |
| | aagagggactagtggttagaggagaccccccggaaaacgcaaaacagcatattgacgctgggaaaga |
| | ccagagactccatgagtttccaccacgctggccgccaggcacaga |
| HDV ribozyme | tcgccgaatagcggcggccggtgtggggaaatccatgggtctggccggcatggtcccagcctcctcgct |
| (2906) | ggcgccggctgggcaacatgcttcggcatggcgaatgggac |
| bGH poly(A) | ctgtgccttctagttgccagccatctgttgtttgcccctcccccgtgccttccttgaccctggaaggtgccac |
| signal (2907) | tcccactgtcctttcctaataaaatgaggaaattgcatcgcattgtctgagtaggtgtcattctattctggggg |
| | gtggggggggcaggacagcaagggggaggattgggaagacaatagcaggcatgctggggatgcgg |
| | tgggctctatgg |

### Example 2: Recombinant Zika Virus Construction

[0415] A construct of a plasmid carrying sequences of Eukaryotic promoter, Hammer head ribozyme, 5′ UTRs, C-partial, 3′UTRs, HDV ribozyme and encoding GFP and Nluc luciferase was designed.

[0416] Vero cells were obtained from ATCC and were raised under DMEM high culture medium. After reaching 80% confluency, DNA linear plasmid was transfected. The transfection was carried out with lipofectamine P3000 (Thermo Scientific™ catalog #L3000015). After 24 hours, a fresh culture medium was added to the cells. To select stable expression of pREP, zeomicyn [1 mg/mL] was added to the medium. Therefore, Vero cells expressing the pREP construct (Vero_pREP) were obtained (see FIG. 4A).

[0417] As illustrated in FIG. 4B, Vero_pREP were infected with wild-type zika virus from the Brazilian strain isolated from a clinical case in Brazil, provided by the Evandro Chagas Institute in Belém, Pará, Brazil. The Vero_pREP cells were infected with a virus concentration of MOI 2. After 30 minutes of incubation period, the culture infection buffer was replaced with fresh media.

[0418] After 24, 48, and 72 hours, the recombinant Zika virus containing the viral vector (ZIKVV) was generated from the transfected Vero_pREP and collected from the media.

[0419] The culture supernatants containing ZIKVV were storage in −80° C.

[0420] Separately, medulloblastoma tumor cell line, Daoy, obtained from ATCC™ was cultured in a 6 well plate under ATCC culture conditions.

[0421] The medulloblastoma tumor cell line was infected with the viral vector generated from the transfected Vero_pREP (see FIG. 4C).

[0422] After 24 hours, the infected medulloblastoma tumor cell line (Daoy) was imaged alive. GFP signal was detected with fluorescent microscopy (EVOS M5000 Imaging System, ThermoFisher™). As shown in FIG. 4D, GFP fluorescence in the medulloblastoma cell line after the infection of the recombinant Zika Virus was observed.

[0423] FIG. 4E shows medulloblastoma cell line 48 hours pos-infection with wild-type Brazilian zika virus. FIG. 4F shows medulloblastoma cell line 48 hours pos-infection with recombinant zika virus with a low amount of adherent cell and cell viability, showing the enhanced oncolytic effect of recombinant zika virus when compared with the wild-type zika virus.

[0424] In another experiment, the vector of FIG. 5 was in vitro transcribed and transfected in Vero cells (step 1 of FIG. 7), followed by ZIKV infection (step 2 of FIG. 7). 120 hours after ZIKV infection, the culture supernatant, containing the viral vector (ZIKVV) produced by Vero cells, was collected, and concentrated with PEG centrifugation. To test the viral vector functionality, the concentrated supernatant was contacted with the target cells (Vero and Daoy cell lines) to confirm the Nanoluc delivery by ZIKVV (step 3 of FIG. 7). The graphs in step 4 of FIG. 7 show Nanoluc quantification in Daoy and Vero cells after contact with Viral vector (pREP+ZIKV), compared to pREP controls (submitted only to pREP transfection) and ZIKV (submitted only to ZIKV infection). A higher level of NanoLuc expression is shown with pREP+ZIKV when compared with the control groups. These results show that ZIKVV delivered NanoLuc to the target cells and confirmed the expression of the reporter gene in target cells.

### Example 3: Expression of Nluc or eGFP after Infection of a Recombinant Zika Virus

[0425] A medulloblastoma tumor cell line is infected with recombinant zika viruses, which are similarly prepared as Example 2. The viability rate and the in vitro transduction rate are measured. Briefly, the medulloblastoma cell lines are cultures in a 96 well plate and infected with the recombinant zika viruses in MOI 1. Cell viability and Nluc expression are measured using the CellTiter-Glo¬Æ 2.0 Cell Viability Assay (Promega—cat. G9242) and Nano-Glo¬Æ Luciferase Assay (Promega—cat. N1110), respectively, following fabricant instructions.

[0426] Separately, the full genome of the infected cell line is sequenced, and probably of insertional mutagenesis is evaluated.

[0427] Similarly, the recombinant zika viruses are injected into wild-type BalBc mice. Over several weeks following the injection, weight, activity, inflammation level near the injection site and systematic inflammation markers in the blood, possible morbidity rate are monitored. In vivo transduction rate, and the effectiveness of crossing blood brain barrier are also evaluated.

[0428] Primary T cells are collected from peripheral blood mononuclear cells (PBMCs) of healthy donor patients. After transducing the primary T cells with recombinant zika virus which are similarly prepared as Examples 1 or 2, the viability rate of the primary T cells after infection and the in-vitro transduction rate are measured.

### Example 4: Treatment of Alzheimer Disease with Recombinant Zika Viruses or Zika-Virus-Like Particles

[0429] An alzheimer mouse model is established.

[0430] Recombinant zika virus or zika-virus-like particles carrying a polynucleotide encoding a brain-derived neurotrophin factor (BDNF) are similarly prepared as Examples 1 or 2.

[0431] One month after the infection of the recombinant zika virus or the zika-virus-like particles with different titers, Morris water maze test and other behavior tests on memory formation and retention are tested on mice with BDNF treatment and mock treatment.

### Example 5: RNA Quantification from a Viral Vector Produced

[0432] RNA quantification was performed from different viral vector batches produced.

[0433] RT-PCT was performed with specific primers for ZIKV genome (gene ZIKV) and pREP (gene pREP), to compare the RNA amount of ZIKV genome and pREP after pREP transfection and ZIKV infection in Vero cells (FIG. 7, steps 1-3). When pREP RNA copies were compared to ZIKV genome RNA copies in one batch that was produced after ZIKV infection with MOI 1, the difference is ten times larger (FIG. 8). A second batch made following ZIKV infection with MOI 0.1 displays a pREP RNA copy number that is comparable to the ZIKV genome copy number (FIG. 8). These findings demonstrate that, at high MOIs, ZIKVV has 10 times as many copies of the pREP gene as the ZIKV genome, with the pREP gene being amplified by viral machinery.

### Example 5: Viral Vector In Vitro Tropism

[0434] The in vitro tropism of ZIKVV (ZIKV genome and pREP RNA) was evaluated. Entry of ZIKVV, ZIKV wild type, or control (pREP mRNA) was tested in cells susceptible to wild-type ZIKV (hCMEC and Daoy) and not susceptible to wild-type ZIKV (HCT-8). Cell lines were combined with the wild-type virus (ZIKV wild type), the viral vector (ZIKVV), and pREP mRNA (control). If the viral vector retains the ability to enter cell lines as does wild-type ZIKV, the mRNA with reporter gene that codes the enzyme NanoLuc Luciferase will be delivered and translated, being detected through luminescence assay. ZIKVV could deliver the gene-of-interest to the cell lines, including the not susceptible HCT-8 cell lines, indicating a higher viral vector spectrum of action, not limited to neural and stem-like cells that are susceptible to wild-type ZIKV (FIG. 9).

### Example 6: Evaluation of ZIKV for Delivery of Various Genes of Interest

[0435] mRNA prepared from zika vectors having various genes of interest were evaluated. Example vectors are shown in FIGS. 10 (pREP-Luc/Gal) and 11 (pREP-Spike), where the genes in FIG. 10 are polycistronic luciferase and beta-galactosidase, and the gene in FIG. 11 encodes SARS-CoV-2 spike protein. Vero cells were transfected with the pREP-Luc/Gal, and expression of both reporter genes show the capability of the pREP construct to deliver and promote the expression of multiple genes with up to 6 Kb (FIG. 12). Furthermore, the SARS-CoV-2 Spike coding sequence was inserted into pREP plasmid to evaluate the strength of expression by ELISA (FIG. 13), showing that the pREP construct can deliver and promote the expression of other gene-of-interests and confirming use of pREP mRNA as vaccine product.

### Example 7: Evaluation of Zika Capsid Coding Sequence

[0436] The evaluation of Zika capsid sequence necessary for pREP (FIG. 5) encapsulation was carried out with five constructs of a plasmid (FIGS. 14A-14E), carrying sequences of Eukaryotic promoter, RNA polymerase promoter, Hammerhead ribozyme, 5′ UTRs, C-partial (15, 30, 45, 60 or 75 bp), 3′UTRs, HDV ribozyme, and encoding GFP and Nluc luciferase was designed. See Table 2, and Table 3 below for the C-partial sequences.

[0437] Using a kit MEGAscript (catalog #AM1330, Life Technologies), in vitro transcription was performed for the vectors according to the user manuals.

[0438] Vero cells were obtained from ATCC and were raised under DMEM high culture medium. After reaching 80% confluency, RNA (FIGS. 14A-14E) and DNA (FIG. 14A and FIG. 14C) plasmid was transfected. The DNA transfection was carried out with lipofectamine P3000 (Thermo Scientific™ catalog #L3000015) and RNA transfection was carried out with Lipofectamine™ MessengerMAX™ (Thermo Scientific™ catalog #LMRNA001) under fabricant instruction conditions.

[0439] After 24 hours, Vero cells were infected with the wild-type zika virus. The Vero cells were infected with a virus concentration of MOI 0.01. After 30 minutes of the incubation period, the culture infection buffer was replaced with fresh media.

[0440] After 120 hours after ZIKV infection, the culture supernatant, containing the viral vectors (ZIKVV) produced by Vero cells, was collected and concentrated with PEG centrifugation.

[0441] RNA quantification was performed from different viral vectors generated (FIGS. 14A-14E).

[0442] RT-PCT was performed with specific primers for the ZIKV genome (ZIKV gene) and pREP (pREP gene) to detect the RNA amount of the ZIKV genome and pREP after pREP transfection and ZIKV infection in Vero cells. pREP RNA copies were quantified from all pREP with different-sized capsid sequences (FIGS. 16A-16B). FIG. 16A shows pREP RNA encapsulation in all plasmids tested (C-partial with 15, 30, 45, 60 and 75 bp). The pREP RNA encapsulation was higher in plasmids with C-partial with 15, 30, 45, and 60 bp, indicating that ZIKVV carrying pREP RNA with Capsid with 20 or fewer amino acids is more efficiently encapsulated into the viral vector. FIG. 16B shows that the encapsulation derived from DNA transfection was efficient and the plasmid with C-partial 45 bp had a higher amount of pREP RNA.

[0443] To test whether the viral vector encapsulates pREP with different size capsid sequences (FIGS. 14A-14E), the concentrated supernatant was contacted with Vero cell lines to confirm Nanoluc delivery by ZIKVV (step 3 of FIG. 7). The graphs in (FIG. 17A and FIG. 17B) shows Nanoluc quantification in Vero cells after contact with viral vector (pREP+ZIKV) carrying 5, 10, 15, 20 and 25 amino acids, derived from both RNA (FIG. 17A) and DNA (FIG. 17B) transfection, compared to ZIKV (only in ZIKV infection). A higher level of NanoLuc expression is demonstrated in viral vectors of all capsid sequence sizes compared to the control group. These results indicate that ZIKVV is able to encapsulate pREP RNA with C-partial (15, 30, 45, 60 and 75 bp) and delivery NanoLuc, confirmed by the expression of the reporter gene in the target cells.

TABLE 3
Zika capsid sequence for pREP (FIGS. 14A-14E) encapsulation.

| Component | Sequence (SEQ ID NO) |
|---|---|
| C Zika (15 bp/5amino) | atgaaaaacccaaaa (2908) |
| C Zika (30 bp/10amino) | atgaaaaacccaaaaaagaaatccggagga (2909) |
| C Zika (45 bp/15amino) | atgaaaaacccaaaaaagaaatccggaggattccggattgtcaat (2910) |
| C Zika (60 bp/20amino) | atgaaaaacccaaaaaagaaatccggaggattccggattgtcaatatgctaaaa |
| | cgcgga (2911) |
| C Zika (75 bp/25amino) | atgaaaaacccaaaaaagaaatccggaggattccggattgtcaatatgctaaaa |
| | cgcggagtagcccgtgtgagc (2912) |
| C Zika (15 bp/5amino) | MKNPK (2913) |
| C Zika (30 bp/10amino) | MKNPKKKSGG (2914) |
| C Zika (45 bp/15amino) | MKNPKKKSGGFRIVN (2915) |
| C Zika (60 bp/20amino) | MKNPKKKSGGFRIVNMLKRG (2916) |
| C Zika (75 bp/25amino) | MKNPKKKSGGFRIVNMLKRGVARVS (2917) |

### Example 8: In Vivo ZIKVV Biodistribution and Tropism

[0444] A feature of the present technology is the potential to generate a viral vector with CNS and ocular tropism. To track the in vivo biodistribution and tropism of ZIKVV, the bioluminescence imaging system was used based on the Nanoluc report gene inserted in the vector gene-of-interest. ZIKVV was systemically administered in Balb/C male mice, with age of 3 weeks, by intraperitoneal injections of ZIKVV produced as in Example 2 and carrying pREP RNA (FIG. 5). 50 ul of ZIKVV 10 times diluted was administered, with a total of 10\hat{ }4 particles. For bioluminescence imaging, the mice received the Nanoluc substrate (Promega—50× diluted) by intraperitoneal administration, in a volume of 50 ul, immediately before image acquisition at IVIS-Spectrum equipment (Perkin-Elmer). A strong signal of Nanoluc was observed in the brains and eye regions, 48 hours after ZIKVV injection in mice. This result confirms the ZIKVV in vivo tropism to eyes and brain, and vector selectively to deliver and transduce the gene-of-interest on these organs after systemic vector administration.

[0445] The preceding merely illustrates the principles of this disclosure. It will be appreciated that those skilled in the art will be able to devise various arrangements which, although not explicitly described or shown herein, embody the principles of the invention and are included within its spirit and scope. Furthermore, all examples and conditional language recited herein are principally intended to aid the reader in understanding the principles of this disclosure and the concepts contributed by the inventors to furthering the art, and are to be construed as being without limitation to such specifically recited examples and conditions. Moreover, all statements herein reciting principles, aspects, and embodiments of the invention as well as specific examples thereof, are intended to encompass both structural and functional equivalents thereof. Additionally, it is intended that such equivalents include both currently known equivalents and equivalents developed in the future, i.e., any elements developed that perform the same function, regardless of structure. The scope of the present disclosure, therefore, is not intended to be limited to the exemplary embodiments shown and described herein. Rather, the scope and spirit of the present disclosure is embodied by the appended claims.

1. A method of delivering a polynucleotide to a target cell in a subject, the method comprising administering to the subject a zika virus or a zika-virus-like particle comprising the polynucleotide, wherein the polynucleotide is not a zika virus polynucleotide, and the target cell is a cell of the central nervous system.

2. A method of delivering a polynucleotide to a subject, the method comprising administering to the subject a zika virus or a zika-virus-like particle comprising the polynucleotide, wherein the polynucleotide is not a zika virus polynucleotide, and the zika virus or zika-virus-like particle does not comprise a replicating zika virus.

3. A method of delivering a polynucleotide to a subject, the method comprising administering to the subject a zika virus or a zika-virus-like particle comprising the polynucleotide, wherein the polynucleotide is not a zika virus polynucleotide, and the polynucleotide has a length up to about 10000 nucleotides.

4. The method of any one of claims 1-3, wherein the subject has a disease or disorder of the central nervous system.

5. The method of any one of claims 1-4, wherein the polynucleotide has a length greater than about 6000 nucleotides.

6. The method of any one of claims 1-5, wherein the subject is a human or non-human animal.

7. A zika virus or zika-virus-like particle comprising a polynucleotide exogenous to zika virus having a length of about 6,000 nucleotides to about 10,000 nucleotides, optionally wherein the polynucleotide does not encode a full-length viral structural protein or a full-length viral nonstructural protein.

8. The method of any one of claims 1-6 or the zika virus or zika-virus-like particle of claim 7, wherein the zika virus or zika-virus-like particle is produced from a nucleic acid comprising the polynucleotide.

9. The method or zika virus or zika-virus-like particle of claim 8, wherein the nucleic acid further comprises a zika virus 5′ UTR and a zika virus 3′ UTR.

10. The method or zika virus or zika-virus-like particle of claim 9, wherein the zika virus 5′ UTR is at least 90% homologous or identical to a zika virus 5′ UTR of Table 2, Table 1A, Table 1C, or Table 1H.

11. The method or zika virus or zika-virus-like particle of claim 9 or claim 10, wherein the zika virus 3′ UTR is at least 90% homologous or identical to a zika virus 3′ UTR of Table 2, Table 1A, Table 1B, or Table 1G.

12. The method or zika virus or zika-virus-like particle of any one of claims 7-11, wherein the nucleic acid further comprises a polynucleotide encoding a first ribozyme.

13. The method or zika virus or zika-virus-like particle of claim 12, wherein the nucleic acid further comprises a polynucleotide encoding a second ribozyme.

14. The method or zika virus or zika-virus-like particle of any one of claims 7-13, wherein the nucleic acid comprises a polynucleotide encoding a derivative of the zika virus C, wherein the derivative of the zika virus C is a truncation of about or less than about 5, 10, 15, 20, 25, or 30 amino acids of zika virus C.

15. The method or zika virus or zika-virus-like particle of any one of claims 7-13, wherein the nucleic acid does not comprise a polynucleotide encoding a zika virus capsid protein (C) or a derivative of the zika virus C.

16. The method or zika virus or zika-virus-like particle of any one of claims 7-15, wherein the nucleic acid does not comprise a polynucleotide encoding a zika virus viral membrane protein (prM/M) or a derivative of the zika virus prM/M.

17. The method or zika virus or zika-virus-like particle of any one of claims 7-16, wherein the nucleic acid does not comprise a polynucleotide encoding a zika virus viral envelope protein (E) or a derivative of the zika virus E.

18. The method or zika virus or zika-virus-like particle of any one of claims 7-17, wherein the nucleic acid does not comprise a polynucleotide encoding one or more non-structural (NS) proteins: (i) a NS1, (ii) a NS2A, (iii) a NS2B, (iv) a NS3, (v) a NS4A, (vi) a NS4B, (vii) a NS5, or (viii) two or more of (i)-(vii).

19. The method or zika virus or zika-virus-like particle of any one of claims 7-18, wherein the nucleic acid further comprises a promoter.

20. The method or zika virus or zika-virus-like particle of any one of claims 7-19, wherein the nucleic acid comprises a sequence of Tables 1A-1K, Table 2, or Table 3.

21. A nucleic acid composition comprising (i) a 5′ untranslated region (5′ UTR) of a first zika virus, (ii) a 3′ UTR of a second zika virus, wherein the first zika virus is optionally the same as the second zika virus, and (iii) a polynucleotide exogenous to the first zika virus and the second zika virus.

22. The nucleic acid composition of claim 21, wherein the polynucleotide is about 5000 bases to about 10000 bases in length.

23. The nucleic acid composition of claim 21 or claim 22, wherein the nucleic acid does not comprise a polynucleotide encoding a zika virus viral envelope protein (E) or a derivative of the zika virus E; and the nucleic acid does not comprise a polynucleotide encoding one or more non-structural (NS) proteins: (i) a NS1, (ii) a NS2A, (iii) a NS2B, (iv) a NS3, (v) a NS4A, (vi) a NS4B, (vii) a NS5, or (viii) two or more of (i)-(vii).

24. The nucleic acid composition of any one of claims 21-23, comprising a sequence of Tables 1A-1K, Table 2 or Table 3.

The application's sequence listing, which the Patent Office published only in electronic form, follows.

SEQUENCE LISTING (2917 sequences)

SEQ ID NO: 1 - RNA, 107 nt, Zika virus
  source 1..107: mol_type = genomic RNA
agttgttgatctgtgtgaatcagactgcgacagttcgagtttgaagcgaaagctagcaacagtatcaacaggttttattttggatttggaaacgagagtttctggtc

SEQ ID NO: 2 - RNA, 429 nt, Zika virus
  source 1..429: mol_type = genomic RNA
gcaccaatcttaatgttgtcaggcctgctagtcagccacagcttggggaaagctgtgcagcctgtgacccccccaggagaagctgggaaaccaagcctatagtcaggccgagaacgccatggcacggaagaagccatgctgcctgtgagcccctcagaggacactgagtcaaaaaaccccatgcgcttggaggcgcaggatgggaaaagaaggtggcgaccttccccacccttcaatctggggcctgaactggagatcagctgtggatctccagaagagggactagtggttagaggagaccccccggaaaacgcaaaacagcatattgacgctgggaaagaccagagactccatgagtttccaccacgctggccgccaggcacagatcgccgaatagcggcggccggtgtggggaaatccatgggtctt

SEQ ID NO: 3 - protein, 122 aa, Zika virus
MKNPKKKSGGFRIVNMLKRGVARVSPFGGLKRLPAGLLLGHGPIRMVLAILAFLRFTAIKPSLGLINRWGSVGKKEAMEIIKKFKKDLAAMLRIINARKEKKRRGADTSVGIVGLLLTTAMA

SEQ ID NO: 4 - protein, 168 aa, Zika virus
AEVTRRGSAYYMYLDRNDAGEAISFPTTLGMNKCYIQIMDLGHMCDATMSYECPMLDEGVEPDDVDCWCNTTSTWVVYGTCHHKKGEARRSRRAVTLPSHSTRKLQTRSQTWLESREYTKHLIRVENWIFRNPGFALAAAAIAWLLGSSTSQKVIYLVMILLIAPAYS

SEQ ID NO: 5 - protein, 504 aa, Zika virus
IRCIGVSNRDFVEGMSGGTWVDVVLEHGGCVTVMAQDKPTVDIELVTTTVSNMAEVRSYCYEASISDMASDSRCPTQGEAYLDKQSDTQYVCKRTLVDRGWGNGCGLFGKGSLVTCAKFACSKKMTGKSIQPENLEYRIMLSVHGSQHSGMIVNDTGHETDENRAKVEITPNSPRAEATLGGFGSLGLDCEPRTGLDFSDLYYLTMNNKHWLVHKEWFHDIPLPWHAGADTGTPHWNNKEALVEFKDAHAKRQTVVVLGSQEGAVHTALAGALEAEMDGAKGRLSSGHLKCRLKMDKLRLKGVSYSLCTAAFTFTKIPAETLHGTVTVEVQYAGTDGPCKVPAQMAVDMQTLTPVGRLITANPVITESTENSKMMLELDPPFGDSYIVIGVGEKKITHHWHRSGSTIGKAFEATVRGAKRMAVLGDTAWDFGSVGGALNSLGKGIHQIFGAAFKSLFGGMSWFSQILIGTLLMWLGLNTKNGSISLMCLALGGVLIFLSTAVSA

SEQ ID NO: 6 - protein, 352 aa, Zika virus
DVGCSVDFSKKETRCGTGVFVYNDVEAWRDRYKYHPDSPRRLAAAVKQAWEDGICGISSVSRMENIMWRSVEGELNAILEENGVQLTVVVGSVKNPMWRGPQRLPVPVNELPHGWKAWGKSYFVRAAKTNNSFVVDGDTLKECPLEHRAWNSFLVEDHGFGVFHTSVWLKVREDYSLECDPAVIGTAVKGKEAVHSDLGYWIESEKNDTWRLKRAHLIEMKTCEWPKSHTLWADGIEESDLIIPKSLAGPLSHHNTREGYRTQMKGPWHSEELEIRFEECPGTKVHVEETCGTRGPSLRSTTASGRVIEEWCCRECTMPPLSFRAKDGCWYGMEIRPRKEPESNLVRSVVTA

SEQ ID NO: 7 - protein, 226 aa, Zika virus
GSTDHMDHFSLGVLVILLMVQEGLKKRMTTKIIISTSMAVLVAMILGGFSMSDLAKLAILMGATFAEMNTGGDVAHLALIAAFKVRPALLVSFIFRANWTPRESMLLALASCLLQTAISALEGDLMVLINGFALAWLAIRAMVVPRTDNITLAILAALTPLARGTLLVAWRAGLATCGGFMLLSLKGKGSVKKNLPFVMALGLTAVRLVDPINVVGLLLLTRSGKR

SEQ ID NO: 8 - protein, 130 aa, Zika virus
SWPPSEVLTAVGLICALAGGFAKADIEMAGPMAAVGLLIVSYVVSGKSVDMYIERAGDITWEKDAEVTGNSPRLDVALDESGDFSLVEDDGPPMREIILKVVLMTICGMNPIAIPFAAGAWYVYVKTGKR

SEQ ID NO: 9 - protein, 617 aa, Zika virus
SGALWDVPAPKEVKKGETTDGVYRVMTRRLLGSTQVGVGVMQEGVFHTMWHVTKGSALRSGEGRLDPYWGDVKQDLVSYCGPWKLDAAWDGHSEVQLLAVPPGERARNIQTLPGIFKTKDGDIGAVALDYPAGTSGSPILDKCGRVIGLYGNGVVIKNGSYVSAITQGRREEETPVECFEPSMLKKKQLTVLDLHPGAGKTRRVLPEIVREAIKTRLRTVILAPTRVVAAEMEEALRGLPVRYMTTAVNVTHSGTEIVDLMCHATFTSRLLQPIRVPNYNLYIMDEAHFTDPSSIAARGYISTRVEMGEAAAIFMTATPPGTRDAFPDSNSPIMDTEVEVPERAWSSGFDWVTDHSGKTVWFVPSVRNGNEIAACLTKAGKRVIQLSRKTFETEFQKTKHQEWDFVVTTDISEMGANFKADRVIDSRRCLKPVILDGERVILAGPMPVTHASAAQRRGRIGRNPNKPGDEYLYGGGCAETDEDHAHWLEARMLLDNIYLQDGLIASLYRPEADKVAAIEGEFKLRTEQRKTFVELMKRGDLPVWLAYQVASAGITYTDRRWCFDGTTNNTIMEDSVPAEVWTRHGEKRVLKPRWMDARVCSDHAALKSFKEFAAGKR

SEQ ID NO: 10 - protein, 127 aa, Zika virus
GAAFGVMEALGTLPGHMTERFQEAIDNLAVLMRAETGSRPYKAAAAQLPETLETIMLLGLLGTVSLGIFFVLMRNKGIGKMGFGMVTLGASAWLMWLSEIEPARIACVLIVVFLLLVVLIPEPEKQR

SEQ ID NO: 11 - protein, 23 aa, Zika virus
SPQDNQMAIIIMVAVGLLGLITA

SEQ ID NO: 12 - protein, 251 aa, Zika virus
NELGWLERTKSDLSHLMGRREEGATIGFSMDIDLRPASAWAIYAALTTFITPAVQHAVTTSYNNYSLMAMATQAGVLFGMGKGMPFYAWDFGVPLLMIGCYSQLTPLTLIVAIILLVAHYMYLIPGLQAAAARAAQKRTAAGIMKNPVVDGIVVTDIDTMTIDPQVEKKMGQVLLIAVAVSSAILSRTAWGWGEAGALITAATSTLWEGSPNKYWNSSTATSLCNIFRGSYLAGASLIYIVTRNAGLVKRR

SEQ ID NO: 13 - protein, 903 aa, Zika virus
GGGTGETLGEKWKARLNQMSALEFYSYKKSGITEVCREEARRALKDGVATGGHAVSRGSAKLRWLVERGYLQPYGKVIDLGCGRGGWSYYAATIRKVQEVKGYTKGGPGHEEPVLVQSYGWNIVRLKSGVDVFHMAAEPCDTLLCDIGESSSSPEVEEARTLRVLSMVGDWLEKRPGAFCIKVLCPYTSTMMETLERLQRRYGGGLVRVPLSRNSTHEMYWVSGAKSNTIKSVSTTSQLLLGRMDGPRRPVKYEEDVNLGSGTRAVVSCAEAPNMKIIGNRIERIRSEHAETWFFDENHPYRTWAYHGSYEAPTQGSASSLINGVVRLLSKPWDVVTGVTGIAMTDTTPYGQQRVFKEKVDTRVPDPQEGTRQVMSMVSSWLWKELGKHKRPRVCTKEEFINKVRSNAALGAIFEEEKEWKTAVEAVNDPRFWALVDKEREHHLRGECQSCVYNMMGKREKKQGEFGKAKGSRAIWYMWLGARFLEFEALGFLNEDHWMGRENSGGGVEGLGLQRLGYVLEEMSRIPGGRMYADDTAGWDTRISRFDLENEALITNQMEKGHRALALAIIKYTYQNKVVKVLRPAEKGKTVMDIISRQDQRGSGQVVTYALNTFTNLVVQLIRNMEAEEVLEMQDLWLLRRSEKVTNWLQSNGWDRLKRMAVSGDDCVVKPIDDRFAHALRFLNDMGKVRKDTQEWKPSTGWDNWEEVPFCSHHFNKLHLKDGRSIVVPCRHQDELIGRARVSPGAGWSIRETACLAKSYAQMWQLLYFHRRDLRLMANAICSSVPVDWVPTGRTTWSIHGKGEWMTTEDMLVVWNRVWIEENDHMEDKTPVTKWTDIPYLGKREDLWCGSLIGHRPRTTWAENIKNTVNMVRRIIGDEEKYMDYLSTQVRYLGEEGSTPGVL

SEQ ID NO: 14 - RNA, 429 nt, Zika virus; identical to SEQ ID NO: 2
  source 1..429: mol_type = genomic RNA

SEQ ID NO: 15 - RNA, 428 nt, Zika virus
  source 1..428: mol_type = genomic RNA
gcaccaattttagtgttgtcaggcctgctagtcagccacagtttggggaaagctgtgcagcctgtaacccccccaggagaagctgggaaaccaagctcatagtcaggccgagaacgccatggcacggaagaagccatgctgcctgtgagcccctcagaggacactgagtcaaaaaaccccacgcgcttggaagcgcaggatgggaaaagaaggtggcgaccttccccacccttcaatctggggcctgaactggagactagctgtgaatctccagcagagggactagtggttagaggagaccccccggaaaacgcaaaacagcatattgacgtgggaaagaccagagactccatgagtttccaccacgctggccgccaggcacagatcgccgaacttcggcggccggtgtggggaaatccatggtttct

SEQ ID NO: 16 - RNA, 429 nt, Zika virus
  source 1..429: mol_type = genomic RNA
gcaccaatcttaatgttgtcaggcctgctagtcagccacagcttggggaaagctgtgcagcctgtgacccccccaggagaagctgggaaaccaagcctatagtcaggccgagaacgccatggcacggaagaagccatgctgcctgtgagcccctcagaggacactgagtcaaaaaaccccacgcgcttggaggcgcaggatgggaaaagaaggtggcgaccttccccacccttcaatctggggcctgaactggagatcagctgtggatctccagaagagggactagtggttagaggagaccccccggaaaacgcaaaacagcatattgacgctgggaaagaccagagactccatgagtttccaccacgctggccgccaggcacagatcgccgaatagcggcggccggtgtggggaaatccatgggtctt

SEQ ID NO: 17 - RNA, 429 nt, Zika virus; identical to SEQ ID NO: 16
  source 1..429: mol_type = genomic RNA

SEQ ID NO: 18 - RNA, 429 nt, Zika virus; identical to SEQ ID NO: 16
  source 1..429: mol_type = genomic RNA

SEQ ID NO: 19 - RNA, 428 nt, Zika virus
  source 1..428: mol_type = genomic RNA
gcaccaatttcaatgttgtcaggcctgctagtcagccacagtttggggaaagctgtgcagcctgtgacccccccaggagaagctgggaaaccaagctcatagtcaggccgacaacgccatggcacggaaaaagccatgctgcctgtgagcccctcagaggacactgagtcaaaaaaccccacgcgcttggaagcgcaggatgggaaaagaaggtggcgaccttccccaccctttaatctggggcctgaactggagattggctgtgaatctccagcagagggactagtggttagaggagaccccccggaaaacgcaaaacagcatattgacgctgggaaagaccagagactccatgagtttccaccacgctggccgccaggcacagatcgccgaatagcggcggccggtgtggggaaatccatgggtct

SEQ ID NO: 20 - RNA, 428 nt, Zika virus
  source 1..428: mol_type = genomic RNA
gcaccaatcttaatgttgtcaggcctgctagtcagccacagcttggggaaagctgtgcagcctgtgacccccccaggagaagctgggaaaccaagcctatagtcaggccgagaacgccatggcacggaagaagccatgctgcctgtgagcccctcagaggacactgagtcaaaaaaccccacgcgcttggaggcgcaggatgggaaaagaaggtggcgaccttccccacccttcaatctggggcctgaactggagatcagctgtggatctccagaagagggactagtggttagaggagaccccccggaaaacgcaaaacagcatattgacgctgggaaagaccagagactccatgagtttccaccacgctggccgccaggcacagatcgccgaatagcggcggccggtgtggggaaatccatgggtct

SEQ ID NO: 21 - RNA, 395 nt, Zika virus
  source 1..395: mol_type = genomic RNA
gcaccaaattcttagcagtgtcaggcctgctagtcagccacagcttggggaaagctgtgcagcctgtgaccccccccaggagaagctgggaaaccaagcccatagtcaggccgagaacgccatggtacggaagaagccatgctgcctgtgagcccctcagaggatactgagtcaaaaaaccccacgcgcttggaggcgcaggatgggaaaagaaggtggcgaccttccccaccctccaatctggggcctgaactggagattagctgtggatctccaggagagggactagtggttagaggagaccccccggaaaacgcaaaacagcatattgacgctgggaaagaccagagactccatgagtttccaccacgctggccgccaggcacagatcgccg

SEQ ID NO: 22 - RNA, 296 nt, Zika virus
  source 1..296: mol_type = genomic RNA
gcaccaatcttagtgttgtcaggcctgctagtcagccacagcttggggaaagctgtgcagcctgtgacccccccaggagaagctgggaaaccaagcccatagtcaggccgagaacgccatggcacggaagaagccatgctgcctgtgagcccctcagaggacactgagtcaaaaaaccccacgcgcttggaggcgcaggatgggaaaagaaggtggcgaccttccccacccttcaatctggggcctgaactggagatcagctgtggatctccagaagagggactagtggttagagg

SEQ ID NO: 23 - RNA, 301 nt, Zika virus
  source 1..301: mol_type = genomic RNA
gcaccaatcttagtgttgtcaggcctgctagtcagccacagcttggggaaagctgtgcagcctgtgacccccccaggagaagctgggaaaccaagcccatagtcaggccgagaacgccatggcacggaagaagccatgctgcctgtgagcccctcagaggacactgagtcaaaaaaccccacgcgcttggaggcgcaggatgggaaaagaaggtggcgaccttccccacccttcaatctggggcctgaactggagatcagctgtggatctccagaagagggactagtggttagaggagacc

SEQ ID NO: 24 - RNA, 295 nt, Zika virus
  source 1..295: mol_type = genomic RNA
gcaccaatcttagtgttgtcaggcctgctagtcagccacagcttggggaaagctgtgcagcctgtgacccccccaggagaagctgggaaaccaagcccatagtcaggccgagaacgccatggcacggaagaagccatgctgcctgtgagcccctcagaggacactgagtcaaaaaaccccacgcgcttggaggcgcaggatgggaaaagaaggtggcgaccttccccaccctttaatctggggcctgaactggagatcagctgtggatctccagaagagggactagtggttagag

SEQ ID NO: 25 - RNA, 370 nt, Zika virus
  source 1..370: mol_type = genomic RNA
gcaccaatcttagtgttgtcaggcctgctagtcagccacagcttggggaaagctgtgcagcctgtgacccccccaggagaagctgggaaaccaagcccatagtcaggccgagaacgccatggcacggaagaagccatgctgcctgtgagcccctcagaggacactgagtcaaaaaaccccacgcgcttggaggcgcaggatgggaaaagaaggtggcgaccttccccacccttcaatctggggcctgaactggagatcagctgtggatctccagaagagggactagtggttagaggagaccccccggaaaacgcaaaacagcatattgacgctgggaaagaccagagactccatgagtttccacatacga

SEQ ID NO: 26 - RNA, 290 nt, Zika virus
  source 1..290: mol_type = genomic RNA
gcaccaatcttagtgttgtcaggcctgctagtcagccacagcttggggaaagctgtgcagcctgtgacccccccaggagaagctgggaaaccaagcccatagtcaggccgagaacgccatggcacggaagaagccatgctgcctgtgagcccctcagaggacactgagtcaaaaaaccccacgcgcttggaggcgcaggatgggaaaagaaggtggcgaccttccccacccttcaatctggggcctgaactggagatcagctgtggatctccagaagagggactagtggt

SEQ ID NO: 27 - RNA, 285 nt, Zika virus
  source 1..285: mol_type = genomic RNA
gcaccaatcttagtgttgtcaggcctgctagtcagccacagcttggggaaagctgtgcagcctgtgacccccccaggagaagctgggaaaccaagcccatagtcaggccgagaacgccatggcacggaagaagccatgctgcctgtgagaccctcagaggacactgagtcaaaaaaccccacgcgcttggaggcgcaggatgggaaaagaaggtggcgaccttccccacccttcaatctggggcctgaactggagattggctgtggatctccagaagagggacta

SEQ ID NO: 28 - RNA, 285 nt, Zika virus; identical to SEQ ID NO: 27
  source 1..285: mol_type = genomic RNA

SEQ ID NO: 29 - RNA, 304 nt, Zika virus
  source 1..304: mol_type = genomic RNA
gcaccaatcttagtgttgtcaggcctgctagtcagccacagcttggggaaagctgtgcagcctgtgacccccccaggagaagctgggaaaccaagcccatagtcaggccgagaacgccatggcacggaagaagtcatgctgcctgtgagcccctcagaggacactgagtcaaaaaaccccacgcgcttggaggcgcaggatgggaaaagaaggtggcgaccttccccaccctttaatctggggcctgaactggagatcagctgtggatctccagaagagggactagtggttagaggagaccccc

SEQ ID NO: 30 - RNA, 267 nt, Zika virus
  source 1..267: mol_type = genomic RNA
gcaccaatcttagtgttgtcaggcctgctagtcagccacagcttggggaaagctgtgcagcctgtgacccccccaggagaagctgggaaaccaagcccatagtcaggccgagaacgccatggcacggaagaagccatgctgcctgtgagaccctcagaggacactgagtcaaaaaaccccacgcgcttggaggcgcaggatgggaaaagaaggtggcgaccttccccacccttcaatctggggcctgaactggagatcggctgtgga

SEQ ID NO: 31 - RNA, 301 nt, Zika virus
  source 1..301: mol_type = genomic RNA
gcaccaatcttagtgttgtcaggcctgctagtcagccacagcttggggaaagctgtgcagcctgtgacccccccaggagaagctgggaaaccaagcccatagtcaggccgagaacgccatggcacggaagaarccatgctgcctgtgagcccctcagaggacactgagtcaaaaaaccccacgcgcttggaggcgcaggatgggaaaagaaggtggcgaccttccccacccttcaatctggggcctgaactggagatcagctgtggatctccagaagagggactagtggttagaggagacc

SEQ ID NO: 32 - RNA, 284 nt, Zika virus
  source 1..284: mol_type = genomic RNA
gcaccaatcttagtgttgtcaggcctgctagtcagccacagcttggggaaagctgtgcagcctgtgacccccccaggagaagctgggaaaccaagcccatagtcaggccgagaacgccatggcacggaagaagccatgctgcctgtgagcccctcagaggacactgagtcaaaaaaccccacgcgcttggaggcgcaggatgggaaaagaaggtggcgaccttccccaccctttaatctggggcctgaactggagatcagctgtggatctccagaagagggact

SEQ ID NO: 33 - RNA, 407 nt, Zika virus
  source 1..407: mol_type = genomic RNA
gcaccagtcttagtgttgtcaggcctgctagtcagccacagcttggggaaagctgtgcagcctgtgacccccccaggagaagctgggaaaccaagcccatagtcaggccgagaacgccatggcacggaagaagccatgctgcctgtgagcccctcagaggacactgagtcaaaaaaccccacgcgcttggaggcgcaggatgggaaaagaaggtggcgaccttccccacccttcaatctggggcctgaactggagatcagctgtggatctccagaagagggactagtggttagaggagaccccccggaaaacgcaaaacagcatattgacgctgggaaagaccagagactccatgagtttccaccacgctggccgccaggcacagatcgccgaatagcggcggccgg

SEQ ID NO: 34 - RNA, 289 nt, Zika virus
  source 1..289: mol_type = genomic RNA
gcaccaatcttagtgttgtcaggcctgctagtcagccacagcttggggaaagctgtgcagcctgtgacccccccaggagaagctgggaaaccaagcccatagtcaggccgagaacgccatggcacggaagaagccatgctgcctgtgagcccctcagaggacactgagtcaaaaaaccccacgcgcttggaggcgcaggatgggaaaagaaggtggcgaccttccccacccttcaatctggggcctgaactggagatcagctgtggatctccagaagagggactagtgg

SEQ ID NO: 35 - RNA, 300 nt, Zika virus
  source 1..300: mol_type = genomic RNA
gcaccagtcttagtgttgtcaggcctgctagtcagccacagcttggggaaagctgtgcagcctgtgacccccccaggagaagctgggaaaccaagcccatagtcaggccgagaacgccatggcacggaagaagccatgctgcctgtgagcccctcagaggacactgagtcaaaaaaccccacgcgcttggaggcgcaggatgggaaaagaaggtggcgaccttccccacccttcaatctggggcctgaactggagatcagctgtggatctccagaagagggactagtggttagaggagac

SEQ ID NO: 36 - RNA, 343 nt, Zika virus
  source 1..343: mol_type = genomic RNA
gcaccaatcttagtgttgtcaggcctgctagtcagccacagcttggggaaagctgtgcagcctgtgacccccccaggagaagctgggaaaccaagcccatagtcaggccgagaacgccatggcacggaagaagccatgctgcctgtgagcccctcagaggacactgagtcaaaaaaccccacgcgcttggaggcgcaggatgggaaaagaaggtggcgaccttccccacccttcaatctggggcctgaactggagatcagctgtggatctccagaagagggactagtggttagaggagaccccccggaaaacgcaaaacagcatattgacgctgggaaagacc

SEQ ID NO: 37 - RNA, 369 nt, Zika virus
  source 1..369: mol_type = genomic RNA
gtaccaattttagtgttgtcaggcctgctagtcagccacagtttggggaaaactgtgcagcctgtaacccccccaggagaagctgggaaaccaagctcatagtcaggccgagaacgccatggtacggaagaagccatgctgcctgtgagcccctcagaggacactgagtcaaaaaaccccatgcgcttggtagcgcaggatgggaaaagaaggtggcgaccttccccaccctttaatctggggcctgaactggagattagctgtgaatctccagcagagggactagtggttagaggagaccccccggaaaacgcaaaacagcatattgacgctgggaaagaccagagactccatgagtttccaccacgc

SEQ ID NO: 38 - RNA, 414 nt, Zika virus
  source 1..414: mol_type = genomic RNA
gcaccaattttagtgttgtcaggcctgctagtcagccacagtttggggaaagctgtgcagcctgtaacccccccaggagaagctgggaaaccaagctcatagtcaggccgagaacgccatggcacggaagaagccatgctgcctgtgagcccctcagaggacactgagtcaaaaaaccccacgcgcttggaagcgcaggatgggaaaagaaggtggcgaccttccccacccttcaatctggggcctgaactggagactagctgtgaatctccagcagagggactagtggttagaggagaccccccggaaaacgcaaaacagcatattgacgctgggaaagaccagagactccatgagtttccaccacgctggccgccaggcacagatcgccgaacagcggcggccggtgtgggg

SEQ ID NO: 39 - RNA, 414 nt, Zika virus; identical to SEQ ID NO: 38
  source 1..414: mol_type = genomic RNA

SEQ ID NO: 40 - RNA, 428 nt, Zika virus
  source 1..428: mol_type = genomic RNA
gcaccagtcttagtgttgtcaggcctgctagtcagccacagcttggggaaagctgtgcagcctgtgacccccccaggagaagctgggaaaccaagcccatagtcaggccgagaacgccatggcacggaagaagccatgctgcctgtgagcccctcagaggacactgagtcaaaaaaccccacgcgcttggaggcgcaggatgggaaaagaaggtggcgaccttccccacccttcaatctggggcctgaactggagatcagctgtggatctccagaagagggactagtggttagaggagaccccccggaaaacgcaaaacagcatattgacgctgggaaagaccagagactccatgagtttccaccacgctggccgccaggcacagatcgccgaatagcggcggccggtgtggggaaatccatgggtct

SEQ ID NO: 41 - RNA, 369 nt, Zika virus
  source 1..369: mol_type = genomic RNA
gcaccagtcttaatgttgtcaggcctgctagtcagccacagcttggggaaagctgtgcagcctgtgacccccccaggagaagctgggaaaccaagcctatagtcaggccgagaacgccatggcacggaagaagccatgctgcctgtgagcccctcagaggacactgagtcaaaaamccccacgcgcttggaggcgcaggatgggaaaagaaggtggcgaccttccccacccttcaatctggggcctgaactggagatcagctgtggatctccagaagagggactagtggttagaggagaccccccggaaaacgcaaaacagcatattgacgctgggaaagaccagagactccatggctttccatggagt

SEQ ID NO: 42 - RNA, 428 nt, Zika virus
  source 1..428: mol_type = genomic RNA
gcatcaatttcaatgttgtcaggcctgctagtcagccacagtttggggaaagctgtgcagcctgtaacccccccaggagaagctgggaaaccaagctcatagtcaggccgataacgccatggcacggaaaaagccatgctgcctgtgagcccctcagaggacactgagtcaaaaaaccccacgcgcttggaagcgcaggatgggaaaagaaggtggcgaccttccccaccctttaatctggggcctgaactggagattagctgtgaatctccggcagaaggactagtggttagaggagaccccccggaaaacgcaaaacagcatattgacgctgggaaagaccagagactccatgagtttccaccacgctggccgccaggcacagatcgccgaacagcggcggccggtgtggggaaatccatgggtct

SEQ ID NO: 43 - RNA, 428 nt, Zika virus; identical to SEQ ID NO: 42
  source 1..428: mol_type = genomic RNA

SEQ ID NO: 44 - RNA, 428 nt, Zika virus
  source 1..428: mol_type = genomic RNA
gcaccaatcttaatgttgtcaggcctgctagtcagccacagcttggggaaagctgtgcagcctgtgacccccccaggagaagctgggaaaccaagcccatagtcaggccgagaacgccatggcacggaagaagccatgctgcctgtgagcccctcagaggacactgagtcaaaaaaccccacgcgcttggaggcgcaggatgggaaaagaaggtggcgaccttccccaccctttaatctggggcctgaactggagatcagctgtggatctccagaagagggactagtggttagaggagaccccccggaaaacgcaaaacagcatattgacgctgggaaagaccagagactccatgagtttccaccacgctggccgccaggcacagatcgccgaatagcggcggccggtgtggggaaatccatgggtct

SEQ ID NO: 45 - RNA, 299 nt, Zika virus
  source 1..299: mol_type = genomic RNA
gcaccaatcttaatgttgtcaggcctgctagtcagccacagcttggggaaagctgtgcagcctgtgacccccccaggagaagctgggaaaccaagcctatagtcaggccgagaacgccatggcacggaagaagccatgctgcctgtgagcccctcagaggacactgagtcaaaaaaccccacgcgcttggaggcgcaggatgggaaaagaaggtggcgaccttccccacccttcaatctggggcctgaactggagatcagctgtggatctccagaagagggactagtggttagaggaga

SEQ ID NO: 46 - RNA, 428 nt, Zika virus; identical to SEQ ID NO: 20
  source 1..428: mol_type = genomic RNA

SEQ ID NO: 47 - RNA, 428 nt, Zika virus; identical to SEQ ID NO: 20
  source 1..428: mol_type = genomic RNA

SEQ ID NO: 48 - RNA, 428 nt, Zika virus; identical to SEQ ID NO: 20
  source 1..428: mol_type = genomic RNA

SEQ ID NO: 49 - RNA, 428 nt, Zika virus; identical to SEQ ID NO: 20
  source 1..428: mol_type = genomic RNA

SEQ ID NO: 50 - RNA, 428 nt, Zika virus
  source 1..428: mol_type = genomic RNA
gcaccaatcctaatgttgtcaggcctgctagtcagccacagcttggggaaagctgtgcagcctgtgacccccccaggagaagctgggaaaccaagcctatagtcaggccgagaacgccatggcacggaagaagccatgctgcctgtgagcccctcagaggacactgagtcaaaaaaccccacgcgcttggaggcgcaggatgggaaaagaaggtggcgaccttccccacccttcaatctggggcctgaactggagatcagctgtggatctccagaagagggactagtggttagaggagaccccccggaaaacgcaaaacagcatattgacgctgggaaagaccagagactccatgagtttccaccacgctggccgccaggcacagatcgccgaatagcggcggccggtgtggggaaatccatgggtct

SEQ ID NO: 51 - RNA, 266 nt, Zika virus
  source 1..266: mol_type = genomic RNA
gcaccaatcttaatgttgtcaggcctgctagtcagccacagcttggggaaagctgtgcagcctgtgacccccccaggagaagctgggaaaccaagcctatagtcaggccgagaacgccatggcacggaagaagccatgctgcctgtgagcccctcagaggacactgagtcaaaaaaccccacgcgcttggaggcgcaggatgggaaaagaaggtggcgaccttccccacccttcaatctggggcctgaactggagatcagctgtgg

SEQ ID NO: 52 - RNA, 266 nt, Zika virus
  source 1..266: mol_type = genomic RNA
gcaccaatcttaatgttgtcaggcctgctagtcagccacagcttggggaaagctgtgcagcctgtgacccccccaggagaagctgggaaaccaagcctatagtcaggccgagaacgccatggcacggaagaagccatgctgcctgtgagcccctcagaggacactgagtcaaaaaaccccacgcgcttggaggcgcaggatgggaaaagaaggtggcgaccttccccaccctttaatctggggcctgaactggagatcagctgtgg

SEQ ID NO: 53 - RNA, 266 nt, Zika virus; identical to SEQ ID NO: 51
  source 1..266: mol_type = genomic RNA

SEQ ID NO: 54 - RNA, 428 nt, Zika virus
  source 1..428: mol_type = genomic RNA
gcaccaatcttagtgttgtcaggcctgctagtcagccacagcttggggaaagctgtgcagcctgtgacccccccaggagaagctgggaaaccaagcccatagtcaggccgagaacgccatggcacggaagaagccatgctgcctgtgagcccctcagaggacactgagtcaaaaaaccccacgcgcttggaggcgcaggatgggaaaagaaggtggcgaccttccccaccctttaatctggggcctgaactggagatcagctgtggacccccgaaagagggactagtggttagaggagaccccccggaaaacgcaaaacagcatattgacgctgggaaagaccagagactccatgagtttccaccacgctggccgccaggcacagatcgccgaatagcggcggccggtgtggggaaatccatgggtct

SEQ ID NO: 55 - RNA, 429 nt, Zika virus; identical to SEQ ID NO: 16
  source 1..429: mol_type = genomic RNA

SEQ ID NO: 56 - RNA, 429 nt, Zika virus; identical to SEQ ID NO: 16
  source 1..429: mol_type = genomic RNA

SEQ ID NO: 57 - RNA, 429 nt, Zika virus; identical to SEQ ID NO: 16
  source 1..429: mol_type = genomic RNA

SEQ ID NO: 58 - RNA, 429 nt, Zika virus; identical to SEQ ID NO: 16
  source 1..429: mol_type = genomic RNA

SEQ ID NO: 59 - RNA, 429 nt, Zika virus; identical to SEQ ID NO: 16
  source 1..429: mol_type = genomic RNA

SEQ ID NO: 60 - RNA, 429 nt, Zika virus; identical to SEQ ID NO: 16
  source 1..429: mol_type = genomic RNA

SEQ ID NO: 61 - RNA, 429 nt, Zika virus; identical to SEQ ID NO: 16
  source 1..429: mol_type = genomic RNA

SEQ ID NO: 62 - RNA, 428 nt, Zika virus; identical to SEQ ID NO: 20
  source 1..428: mol_type = genomic RNA

SEQ ID NO: 63 - RNA, 399 nt, Zika virus
  source 1..399: mol_type = genomic RNA
gcaccaatcttaatgttgtcaggcctgctagtcagccacagcttggggaaagctgtgcagcctgtgacccccccaggagaagctgggaaaccaagcctatagtcaggccgagaacgccatggcacggaagaagccatgctgcctgtgagcccctcagaggacactgagtcaaaaaaccccacgcgcttggaggcgcaggatgggaaaagaaggtggcgaccttccccacccttcaatctggggcctgaactggagatcagctgtggatctccagaagagggactagtggttagaggagaccccccggaaaacgcaaaacagcatattgacgctgggaaagaccagagactccatgagtttccaccacgctggccgccaggcacagatcgccgaatagcg

SEQ ID NO: 64 - RNA, 394 nt, Zika virus
  source 1..394: mol_type = genomic RNA
gcaccaatcttaatgttgtcaggcctgctagtcagccacagcttggggaaagctgtgcagcctgtgacccccccaggagaagctgggaaaccaagcctatagtcaggccgagaacgccatggcacggaagaagccatgctgcctgtgagcccctcagaggacactgagtcaaaaaaccccacgcgcttggaggcgcaggatgggaaaagaaggtggcgaccttccccacccttcaatctggggcctgaactggagatcagctgtggatctccagaagagggactagtggttagaggagaccccccggaaaacgcaaaacagcatattgacgctgggaaagaccagagactccatgagtttccaccacgctggccgccaggcacagatcgccgaa

SEQ ID NO: 65 - RNA, 392 nt, Zika virus
  source 1..392: mol_type = genomic RNA
gcaccaatcttaatgttgtcaggcctgctagtcagccacagcttggggaaagctgtgcagcctgtgacccccccaggagaagctgggaaaccaagcctatagtcaggccgagaacgccatggcacggaagaagccatgctgcctgtgagcccctcagaggacactgagtcaaaaaaccccacgcgcttggaggcgcaggatgggaaaagaaggtggcgaccttccccacccttcaatctggggcctgaactggagatcagctgtggatctccagaagagggactagtggttagaggagaccccccggaaaacgcaaaacagcatattgacgctgggaaagaccagagactccatgagtttccaccacgctggccgccaggcacagatcgccg

SEQ ID NO: 66 - RNA, 428 nt, Zika virus
  source 1..428: mol_type = genomic RNA
gcaccaatcttaatgttgtcaggcctgctagtcagccacagcttggggaaagctgtgcagcctgtgacccccccaggagaagctgggaaaccaagcctatagtcaggccgagaacgccatggcattgaagaagccatgctgcctgtgagcccctcagaggacactgagtcaaaaaaccccacgcgcttggaggcgcaggatgggaaaagaaggtggcgaccttccccacccttcaatctggggcctgaactggagatcagctgtggatctccagaagagggactagtggttagaggagaccccccggaaaacgcaaaacagcatattgacgctgggaaagaccagagactccatgagtttccaccacgctggccgccaggcacagatcgccgaatagcggcggccggtgtggggaaatccatgggtct

SEQ ID NO: 67 - RNA, 428 nt, Zika virus
  source 1..428: mol_type = genomic RNA
gcaccaatcttaatgttgtcaggcctgctagtcagccacagcttggggaaagctgtgcagcctgtgacccccccaggagaagctgggaaaccaagcctatagtcaggccgagaacgccatggcacggaagaagccatgctgcctgtgagcccctcagaggacactgagtcaaaaaaccccacgcgcttggaggcgcaggatgggaaaagaaggtggcgaccttccccacccttcaatctggggcctgaactggagatcagctgtggatctccagaagagggactagtggttagaggagaccccccggaaaacgcaaaacagcatattgacgttgggaaagaccagagactccatgagtttccaccacgctggccgccaggcacagatcgccgaatagcggcggccggtgtggggaaatccatgggtct

SEQ ID NO: 68 - RNA, 428 nt, Zika virus
  source 1..428: mol_type = genomic RNA
gcaccaatcttaatgttgtcaggcctgctagtcagccacagcttggggaaagctgtgcagcctgtgacccccccaggagaagctgggaaaccaagcctatagtcaggccgagaacgccatggcacggaagaagccatgctgcctgtgagcccctcagaggacactgagtcaaaaaaccccacgcgcttggaggcgcaggatgggaaaagaaggtggcgaccttccccacccttcaatctggggcctgaactggagatcagctgtggatctccagaagagggactagtggttagaggagaccccccggaaaacgcaaaacagcatattgtcggtgggaacggccagagcctccatgagtttcccccacgctggccgccaggcacagatcgccgaatagcggcggccggtgtggggaaatccatgggtct

SEQ ID NO: 69 - RNA, 428 nt, Zika virus
  source 1..428: mol_type = genomic RNA
gcaccaatcttaatgttgtcaggcctgctagtcagccacagcttggggaaagctgtgcagcctgtgacccccccaggagaagctgggaaaccaagcctatagtcaggccgagaacgccatggcacggaagaagccatgctgcctgtgagcccctcagaggacactgagtcaaaaaaccccacgcgcttggaggcgcaggatgggaaaagaaggtggcgaccttccccacccttcaatctggggcctgaactggagatcagctgtggatctccagaagagggactagtggttagaggagaccccccggaaaacgcaaaacagcatattgacgctgggaaagaccagagactccgtgagtttccaccacgctggccgccaggcacagatcgccgaatagcggcggccggtgtggggaaatccatgggtct

SEQ ID NO: 70 - RNA, 428 nt, Zika virus
  source 1..428: mol_type = genomic RNA
gcaccaatcttaatgttgtcaggcctgccagtcagccacagcttggggaaagctgtgcagcctgtgacccccccaggagaagctgggaaaccaagcctatagtcaggccgagaacgccatggcacggaagaagccatgctgcctgtgagcccctcagaggacactgagtcaaaaaaccccacgcgcttggaggcgcaggatgggaaaagaaggtggcgaccttccccacccttcaatctggggcctgaactggagatcagctgtggatctccagaagagggactagtggttagaggagaccccccggaaaacgcaaaacagcatattgacgctgggaaagaccagagactccatgagtttccaccacgctggccgccaggcacagatcgccgaatagcggcggccggtgtggggaaatccatgggtct

SEQ ID NO: 71 - RNA, 428 nt, Zika virus; identical to SEQ ID NO: 20
  source 1..428: mol_type = genomic RNA

SEQ ID NO: 72 - RNA, 428 nt, Zika virus; identical to SEQ ID NO: 20
  source 1..428: mol_type = genomic RNA

SEQ ID NO: 73 - RNA, 428 nt, Zika virus
  source 1..428: mol_type = genomic RNA
gcatcaatcttaatgttgtcaggcctgccagtcagccacagcttggggaaagctgtgcagcctgtgacccccccaggagaagctgggaaaccaagcctatagtcaggccgagaacgccatggcacggaagaagccatgctgcctgtgagcccctcagaggacactgagtcaaaaaaccccacgcgcttggaagcgcaggatgggaaaagaaggtggcgaccttccccacccttcaatctggggcctgaactggagatcagctgtggatctccagaagagggactagtggttagaggagaccccccggaaaacgcaaaacagcatattgacgctgggaaagaccagagactccatgagtttccaacacgatggcggccaggcacagatcgccgaatagcggcggccggtgtggggaaatccatgggtct

SEQ ID NO: 74 - RNA, 428 nt, Zika virus; identical to SEQ ID NO: 70
  source 1..428: mol_type = genomic RNA

SEQ ID NO: 75 - RNA, 428 nt, Zika virus; identical to SEQ ID NO: 20
  source 1..428: mol_type = genomic RNA

SEQ ID NO: 76 - RNA, 428 nt, Zika virus
  source 1..428: mol_type = genomic RNA
gcaccaatcttaatgttgtcaggcctgctagtcagccacagcttggggaaagctgtgcagcctgtgacccccccaggagaagctgggaaaccaagcctatagtcaggccgagaacgccatggcacggaagaagccatgctgcctgtgagcccctcagaggacactgagtcaaaaaaccccacgcgcttggaggcgcaggatgggaaaagaaggtggcgaccttccccacccttcaatctggggcctgaactggagatcagctgtggatctccagaagagggactagtggttagaggagaccccccggaaaacgcaaaacagcatattgacgctggcaaagaccagagactccaagagtttccaccacgctggccgccaggcacagatcgccgaatagcggcggccggtgcggggaaatccatgggtct

SEQ ID NO: 77 - RNA, 428 nt, Zika virus; identical to SEQ ID NO: 20
  source 1..428: mol_type = genomic RNA

SEQ ID NO: 78 - RNA, 346 nt, Zika virus
  source 1..346: mol_type = genomic RNA
gcaccaatttcaatgttgtcaggcctgctagtcagccacagtttggggaaagctgtgcagcctgtgacccccccaggagaagctgggaaaccaagctcatagtcaggccgacaacgccatggcacggaaaaagccatgctgcctgtgagcccctcagaggacactgagtcaaaaaaccccacgcgcttggaagcgcaggatgggaaaagaaggtggcgaccttccccaccctttaatctggggcctgaactggagattggctgtgaatctccagcagagggactagtggttagaggagaccccccggaaaacgcaaaacagcatattgacgctgggaaagaccaga

SEQ ID NO: 79 - RNA, 297 nt, Zika virus
  source 1..297: mol_type = genomic RNA
gcaccaatcttaatgttgtcaggcctgctagtcagccacagcttggggaaagctgtgcagcctgtgacccccccaggagaagctgggaaaccaagcctatagtcaggccgagaacgccatggcacggaagaagccatgctgcctgtgagcccctcagaggacactgagtcaaaaaaccccacgcgcttggaggcgcaggatgggaaaagaaggtggcgaccttccccacccttcaatctggggcctgaactggagatcagctgtggatctccagaagagggactagtggttagagga

SEQ ID NO: 80 - RNA, 424 nt, Zika virus
  source 1..424: mol_type = genomic RNA
gcaccaatcttaatgttgtcaggcctgctagtcagccacagcttggggaaagctgtgcagcctgtgacccccccaggagaagctgggaaaccaagcctatagtcaggccgagaacgccatggcacggaagaagccatgctgcctgtgagcccctcagaggacactgagtcaaaaaaccccacgcgcttggaggcgcaggatgggaaaagaaggtggcgaccttccccacccttcaatctggggcctgaactggagatcagctgtggatctccagaagagggactagtggttagaggagaccccccggaaaacgcaaaacagcatattgacgctgggaaagaccagagactccatgagtttccaccacgctggccgccaggcacagatcgccgaatagcggcggccggtgtggggaaatccatgg

SEQ ID NO: 81 - RNA, 386 nt, Zika virus
  source 1..386: mol_type = genomic RNA
gcaccaatcttaatgttgtcaggcctgctagtcagccacagcttggggaaagctgtgcagcctgtgacccccccaggagaagctgggaaaccaagcctatagtcaggccgggaacgccatggcacggaagaagccatgctgcctgtgagcccctcagaggacactgagtcaaaaaaccccacgcgcttggaggcgcaggatgggaaaagaaggtggcgaccttccccacccttcaatctggggcctgaactggagatcagctgtggatctccagaagagggactagtggttagaggagaccccccggaaaacgcaaaacagcatattgacgctgggaaagaccagagactccatgagtttccaccacgctggccgccaggcacaga

SEQ ID NO: 82 - RNA, 386 nt, Zika virus; identical to SEQ ID NO: 81
  source 1..386: mol_type = genomic RNA

SEQ ID NO: 83 - RNA, 386 nt, Zika virus; identical to SEQ ID NO: 81
  source 1..386: mol_type = genomic RNA

SEQ ID NO: 84 - RNA, 386 nt, Zika virus
  source 1..386: mol_type = genomic RNA
gcaccaatcttaatgttgtcaggcctgctagtcagccacagcttggggaaagctgtgcagcctgtgacccccccaggagaagctgggaaaccaagcctatagtcaggccgggaacgccatggcacggaagaagccatgctgcctgtgagcccctcagaggacactgagtcaaaaaaccccacgcgcttggaggcgcaggatgggaaaagaaggtggcgaccttccccacccttcaatctggggcctgaactggagatcagctgtggatctccagaagagggactagtggttagaggagaccccctggaaaacgcaaaacagcatattgacgctgggaaagaccagagactccatgagtttccaccacgctggccgccaggcacaga

SEQ ID NO: 85 - RNA, 385 nt, Zika virus
  source 1..385: mol_type = genomic RNA
gcaccaatcttaatgttgtcaggcctgctagtcagccacagcttggggaaagctgtgcagcctgtgacccccccaggagaagctgggaaaccaagcctatagtcaggccgggaacgccatggcacggaagaagccatgctgcctgtgagcccctcagaggacactgagtcaaaaaaccccacgcgcttggaggcgcaggatgggaaaagaaggtggcgaccttccccacccttcaatctggggcctgaactggagatcagctgtggatctccagaagagggactagtggttagaggagaccccctggaaaacgcaaaacagcatattgacgctgggaaagaccagagactccatgagtttccaccacgctggccgccaggcacag

SEQ ID NO: 86 - RNA, 386 nt, Zika virus; identical to SEQ ID NO: 84
  source 1..386: mol_type = genomic RNA

SEQ ID NO: 87 - RNA, 358 nt, Zika virus
  source 1..358: mol_type = genomic RNA
gcaccaatcttaatgttgtcaggcctgctagtcagccacagcttggggaaagctgtgcagcctgtgacccccccaggagaagctgggaaaccaagcctatagtcaggccgggaacgccatggcacggaagaagccatgctgcctgtgagcccctcagaggacactgagtcaaaaaaccccacgcgcttggaggcgcaggatgggaaaagaaggtggcgaccttccccacccttcaatctggggcctgaactggagatcagctgtggatctccagaagagggactagtggttagaggagaccccctggaaaacgcaaaacagcatattgacgctgggaaagaccagagactccatgagt

SEQ ID NO: 88 - RNA, 387 nt, Zika virus
  source 1..387: mol_type = genomic RNA
gcaccaatcttaatgttgtcaggcctgctagtcagccacagcttggggaaagctgtgcagcctgtgacccccccaggagaagctgggaaaccaagcctatagtcaggccgggaacgccatggcacggaagaagccatgctgcctgtgagcccctcagaggacactgagtcaaaaaaccccacgcgcttggaggcgcaggatgggaaaagaaggtggcgaccttccccacccttcaatctggggcctgaactggagatcagctgtggatctccagaagagggactagtggttagaggagaccccctggaaaacgcaaaacagcatattgacgctgggaaagaccagagactccatgagtttccaccacgctggccgccaggcacagat

SEQ ID NO: 89 - RNA, 411 nt, Zika virus
  source 1..411: mol_type = genomic RNA
gcaccaatcttaatgttgtcaggcctgctagtcagccacagcttggggaaagctgtgcagcctgtgacccccccaggagaagctgggaaaccaagcctatagtcaggccgggaacgccatggcacggaagaagccatgctgcctgtgagcccctcagaggacactgagtcaaaaaaccccacgcgcttggaggcgcaggatgggaaaagaaggtggcgaccttccccacccttcaatctggggcctgaactggagatcagctgtggatctccagaagagggactagtggttagaggagaccccctggaaaacgcaaaacagcatattgacgctgggaaagaccagagactccatgagtttccaccacgctggccgccaggcacagatcgccgaatagcggcggccggtgtg

SEQ ID NO: 90 - RNA, 416 nt, Zika virus
  source 1..416: mol_type = genomic RNA
gcaccaatcttaatgttgtcaggcctgctagtcagccacagcttggggaaagctgtgcagcctgtgacccccccaggagaagctgggaaaccaagcctatagtcaggccgggaacgccatggcacggaagaagccatgctgcctgtgagcccctcagaggacactgagtcaaaaaaccccacgcgcttggaggcgcaggatgggaaaagaaggtggcgaccttccccacccttcaatctggggcctgaactggagatcagctgtggatctccagaagagggactagtggttagaggagaccccctggaaaacgcaaaacagcatattgacgctgggaaagaccagagactccatgagtttccaccacgctggccgccaggcacagatcgccgaatagcggcggccggtgtggggaa

SEQ ID NO: 91 - RNA, 417 nt, Zika virus
  source 1..417: mol_type = genomic RNA
gcaccaatcttaatgttgtcaggcctgctagtcagccacagcttggggaaagctgtgcagcctgtgacccccccaggagaagctgggaaaccaagcctatagtcaggccgggaacgccatggcacggaagaagccatgctgcctgtgagcccctcagaggacactgagtcaaaaaaccccacgcgcttggaggcgcaggatgggaaaagaaggtggcgaccttccccacccttcaatctggggcctgaactggagatcagctgtggatctccagaagagggactagtggttagaggagaccccctggaaaacgcaaaacagcatattgacgctgggaaagaccagagactccatgagtttccaccacgctggccgccaggcacagatcgccgaatagcggcggccggtgtggggaaa

SEQ ID NO: 92 - RNA, 328 nt, Zika virus
  source 1..328: mol_type = genomic RNA
gcaccaatcttaatgttgtcaggcctgctagtcagccacagcttggggaaagctgtgcagcctgtgacccccccaggagaagctgggaaaccaagcctatagtcaggccgggaacgccatggcacggaagaagccatgctgcctgtgagcccctcagaggacactgagtcaaaaaaccccacgcgcttggaggcgcaggatgggaaaagaaggtggcgaccttccccacccttcaatctggggcctgaactggagatcagctgtggatctccagaagagggactagtggttagaggagaccccctggaaaacgcaaaacagcatattg

SEQ ID NO: 93 - RNA, 365 nt, Zika virus
  source 1..365: mol_type = genomic RNA
gcaccaatcttaatgttgtcaggcctgctagtcagccacagcttggggaaagctgtgcagcctgtgacccccccaggagaagctgggaaaccaagcctatagtcaggccgggaacgccatggcacggaagaagccatgctgcctgtgagcccctcagaggacactgagtcaaaaaaccccacgcgcttggaggcgcaggatgggaaaagaaggtggcgaccttccccacccttcaatctggggcctgaactggagatcagctgtggatctccagaagagggactagtggttagaggagaccccctggaaaacgcaaaacagcatattgacgctgggaaagaccagagactccatgagtttccacc

SEQ ID NO: 94 - RNA, 386 nt, Zika virus; identical to SEQ ID NO: 81
  source 1..386: mol_type = genomic RNA

SEQ ID NO: 95 - RNA, 386 nt, Zika virus; identical to SEQ ID NO: 81
  source 1..386: mol_type = genomic RNA

SEQ ID NO: 96 - RNA, 417 nt, Zika virus
  source 1..417: mol_type = genomic RNA
gcaccaatcttaatgttgtcaggcctgctagtcagccacagcttggggaaagctgtgcagcctgtgacccccccaggagaagctgggaaaccaagcctatagtcaggccgagaacgccatggcacggaagaagccatgctgcctgtgagcccctcagaggacactgagtcaaaaaaccccacgcgcttggaggcgcaggatgggaaaagaaggtggcgaccttccccacccttcaatctggggcctgaactggagatcagctgtggatctccagaagagggactagtggttagaggagaccccccggaaaacgcaaaacagcatattgacgctgggaaagaccagagactccatgagtttccaccacgctggccgccaggcacagatcgccgaatagcggcggccagtgtggggaaa

SEQ ID NO: 97 - RNA, 398 nt, Zika virus
  source 1..398: mol_type = genomic RNA
gcaccaatcttaatgttgtcaggcctgctagtcagccacagcttggggaaagctgtgcagcctgtgacccccccaggagaagctgggaaaccaagcctatagtcaggccgagaacgccatggcacggaagaagccatgctgcctgtgagcccctcagaggacactgagtcaaaaaaccccacgcgcttggaggcgcaggatgggaaaagaaggtggcgaccttccccacccttcaatctggggcctgaactggagatcagctgtggatctccagaagagggactagtggttagaggagaccccccggaaaacgcaaaacagcatattgacgctgggaaagaccagagactccatgagtttccaccacgctggccgccaggcacagatcgccgaatagc

SEQ ID NO: 98 - RNA, 417 nt, Zika virus; identical to SEQ ID NO: 96
  source 1..417: mol_type = genomic RNA

SEQ ID NO: 99 - RNA, 417 nt, Zika virus; identical to SEQ ID NO: 96
  source 1..417: mol_type = genomic RNA

SEQ ID NO: 100 - RNA, 386 nt, Zika virus
  source 1..386: mol_type = genomic RNA
gcaccaatcttaatgttgtcaggcctgctagtcagccacagcttggggaaagctgtgcagcctgtgacccccccaggagaagctgggaaaccaagcctatagtcaggccgagaacgccatggcacggaagaagccatgctgcctgtgagcccctcagaggacactgagtcaaaaaaccccacgcgcttggaggcgcaggatgggaaaagaaggtggcgaccttccccacccttcaatctggggcctgaactggagatcagctgtggatctccagaagagggactagtggttagaggagaccccccggaaaacgcaaaacagcatattgacgctgggaaagaccagagactccatgagtttccaccacgctggccgccaggcacaga

SEQ ID NO: 101 - RNA, 416 nt, Zika virus
  source 1..416: mol_type = genomic RNA
gcaccaatcttaatgttgtcaggcctgctagtcagccacagcttggggaaagctgtgcagcctgtgacccccccaggagaagctgggaaaccaagcctatagtcaggccgagaacgccatggcacggaagaagccatgctgcctgtgagcccctcagaggacactgagtcaaaaaaccccacgcgcttggaggcgcaggatgggaaaagaaggtggcgaccttccccacccttcaatctggggcctgaactggagatcagctgtggatctccagaagagggactagtggttagaggagaccccccggaaaacgcaaaacagcatattgacgctgggaaagaccagagactccatgagtttccaccacgctggccgccaggcacagatcgccgaatagcggcggccagtgtggggaa

SEQ ID NO: 102 - RNA, 414 nt, Zika virus; identical to SEQ ID NO: 38
  source 1..414: mol_type = genomic RNA

SEQ ID NO: 103 - RNA, 429 nt, Zika virus; identical to SEQ ID NO: 16
  source 1..429: mol_type = genomic RNA

SEQ ID NO: 104 - RNA, 429 nt, Zika virus; identical to SEQ ID NO: 16
  source 1..429: mol_type = genomic RNA

SEQ ID NO: 105 - RNA, 392 nt, Zika virus
  source 1..392: mol_type = genomic RNA
gcaccaatcttagtgttgtcaggcctgctagtcagccacagcttggggaaagctgtgcagcctgtgacccccccaggagaggctgggaaaccaagcccatagtcaggccgagaacgccatggcacggaagaagccatgctgcctgtgagcccctcagaggacactgagtcaaaaaaccccacgcgcttggaggcgcaggatgggaaaagaaggtggcgaccttccccacccttcaatctggggcctgaactggagatcagctgtggatctccagaagagggactagtggttagaggagaccccccggaaaacgcaaaacagcatattgacgctgggaaagaccagagactccatgagtttccaccacgctggccgccaggcacagatcgccg

SEQ ID NO: 106 - RNA, 372 nt, Zika virus
  source 1..372: mol_type = genomic RNA
gcaccaatcttagtgttgtcaggcctgctagtcagccacagcttggggaaagctgtgcagcctgtgacccccccaggagaggctgggaaaccaagcccatagtcaggccgagaacgccatggcacggaagaagccatgctgcctgtgagcccctcagaggacactgagtcaaaaaaccccacgcgcttggaggcgcaggatgggaaaagaaggtggcgaccttccccacccttcaatctggggcctgaactggagatcagctgtggatctccagaagagggactagtggttagaggagaccccccggaaaacgcaaaacagcatattgacgctgggaaagaccagagactccatgagtttccaccacgctgg

SEQ ID NO: 107 - RNA, 299 nt, Zika virus; identical to SEQ ID NO: 45
  source 1..299: mol_type = genomic RNA

SEQ ID NO: 108 - RNA, 299 nt, Zika virus; identical to SEQ ID NO: 45
  source 1..299: mol_type = genomic RNA

SEQ ID NO: 109 - RNA, 299 nt, Zika virus; identical to SEQ ID NO: 45
  source 1..299: mol_type = genomic RNA

SEQ ID NO: 110 - RNA, 427 nt, Zika virus
  source 1..427: mol_type = genomic RNA
gcaccaatttcaatgttgtcaggcctgctagtcagccacagtttggggaaagctgtgcagcctgtaacccccccaggagaagctgggaaaccaagctcatagtcaggccgataacgccatggcacggaaaaagccatgctgcctgtgagcccctcagaggacactgagtcaaaaaaccccacgcgcttggaagcgcaggatgggaaaagaaggtggcgaccttccccaccctttaatctggggcctgagctggagattagctgtgaatctccagcagaaggactagtggttagaggagaccccccggaaaacgcaaaacagcatattgacgctgggaaagaccagagactccatgagtttccaccacgctggccgccaggcacagatcgccgaacagcggcggccagtgtggggaaatccatgggtc

SEQ ID NO: 111 - RNA, 286 nt, Zika virus
  source 1..286: mol_type = genomic RNA
gcaccaatcttaatgttgtcaggcctgctagtcagccacagcttggggaaagctgtgcagcctgtgacccccccaggagaagctgggaaaccaagcctatagtcaggccgagaacgccatggcacggaagaagccatgctgcctgtgagcccctcagaggacactgagtcaaaaaaccccacgcgcttggaggcgcaggatgggaaaagaaggtggcgaccttccccacccttcaatctggggcctgaactggagatcagctgtggatctccagaagagggactag

SEQ ID NO: 112 - RNA, 304 nt, Zika virus
  source 1..304: mol_type = genomic RNA
gcaccaatcttaatgttgtcaggcctgctagtcagccacagcttggggaaagctgtgcagcctgtgacccccccaggagaagctgggaaaccaagcctatagtcaggccgagaacgccatggcacggaagaagccatgctgcctgtgagcccctcagaggacactgagtcaaaaaaccccacgcgcttggaggcgcaggatgggaaaagaaggtggcgaccttccccacccttcaatctggggcctgaactggagatcagctgtggatctccagaagagggactagtggttagaggagaccccc

SEQ ID NO: 113 - RNA, 304 nt, Zika virus; identical to SEQ ID NO: 112
  source 1..304: mol_type = genomic RNA

SEQ ID NO: 114 - RNA, 428 nt, Zika virus; identical to SEQ ID NO: 20
  source 1..428: mol_type = genomic RNA

SEQ ID NO: 115 - RNA, 428 nt, Zika virus
  source 1..428: mol_type = genomic RNA
gcaccaatcttagtgttgtcaggcctgctagtcagccacagcttggggaaagctgtgcagcctgtgacccccccaggagaagctgggaaaccaagcccatagtcaggccgagaacgccatggcacggaagaagccatgctgcctgtgagcccctcagaggacactgagtcaaaaaaccccacgcgcttggaggcgcaggatgggaaaagaaggtggcgaccttccccacccttcaatctggggcctgaactggagatcagctgtggatctccagaagagggactagtggttagaggagaccccccggaaaacgcaaaacagcatattgacgctgggaaagaccagagactccatgagtttccaccacgctggccgccaggcacagatcgccgaatagcggcggccggtgtggggaaatccatgggtct

SEQ ID NO: 116 - RNA, 428 nt, Zika virus; identical to SEQ ID NO: 115
  source 1..428: mol_type = genomic RNA

SEQ ID NO: 117 - RNA, 428 nt, Zika virus; identical to SEQ ID NO: 115
  source 1..428: mol_type = genomic RNA

SEQ ID NO: 118 - RNA, 428 nt, Zika virus; identical to SEQ ID NO: 115
  source 1..428: mol_type = genomic RNA

SEQ ID NO: 119 - RNA, 428 nt, Zika virus; identical to SEQ ID NO: 115
  source 1..428: mol_type = genomic RNA

SEQ ID NO: 120 - RNA, 399 nt, Zika virus
  source 1..399: mol_type = genomic RNA
gcaccaatcttagtgttgtcaggcctgctagtcagccacagcttggggaaagctgtgcagcctgtgacccccccaggagaagctgggaaaccaagcccatagtcaggccgagaacgccatggcacggaagaagccatgctgcctgtgagcccctcagaggacactgagtcaaaaaaccccacgcgcttggaggcgcaggatgggaaaagaaggtggcgaccttccccacccttcaatctggggcctgaactggagatcagctgtggatctccagaagagggactagtggttagaggagaccccccggaaaacgcaaaacagcatattgacgctgggaaagaccagagactccatgagtttccaccacgctggccgccaggcacagatcgccgaatagcg

SEQ ID NO: 121 - RNA, 428 nt, Zika virus; identical to SEQ ID NO: 20
  source 1..428: mol_type = genomic RNA

SEQ ID NO: 122 - RNA, 428 nt, Zika virus; identical to SEQ ID NO: 20
  source 1..428: mol_type = genomic RNA

SEQ ID NO: 123 - RNA, 428 nt, Zika virus; identical to SEQ ID NO: 50
  source 1..428: mol_type = genomic RNA

SEQ ID NO: 124 - RNA, 428 nt, Zika virus; identical to SEQ ID NO: 42
  source 1..428: mol_type = genomic RNA

SEQ ID NO: 125 - RNA, 428 nt, Zika virus; identical to SEQ ID NO: 42
  source 1..428: mol_type = genomic RNA

SEQ ID NO: 126 - RNA, 428 nt, Zika virus
  source 1..428: mol_type = genomic RNA
gcaccaatcttagtgttgtcaggcctgctagtcagccacagcttggggaaagctgtgcagcctgtgacccccccaggagaagctgggaaaccaagcccatagtcaggccgagaacgccatggcacggaagaagccatgctgcctgtgagcccctcagaggacactgagtcaaaaaaccccacgcgcttggaggcgcaggatgggaaaagaaggtggcgaccttccccaccctttaatctggggcctgaactggagatcagctgtggatctccagaagagggactagtggttagaggagaccccccggaaaacgcaaaacagcatattgacgctgggaaagaccagagactccatgagtttccaccacgctggccgccaggcacagatcgccgaatagcggcggccggtgtggggaaatccatgggtct

SEQ ID NO: 127 - RNA, 428 nt, Zika virus; identical to SEQ ID NO: 20
  source 1..428: mol_type = genomic RNA

SEQ ID NO: 128 - RNA, 370 nt, Zika virus
  source 1..370: mol_type = genomic RNA
gcaccaattttagtgttgtcaggcctgctagtcagccacagtttggggaaagctgtgcagcctgtaacccccccaggagaagctgggaaaccaagctcatagtcaggccgagaacgccatggcacggaagaagccatgctgcctgtgagcccctcagaggacactgagtcaaaaaaccccacgcgcttggaagcgcaggatgggaaaagaaggtggcgaccttccccacccttcaatctggggcctgaactggagactagctgtgaatctccagcagagggactagtggttagaggagaccccccggaaaacgcaaaacagcatattgacgctgggaaagaccagagactccatgagtttccaccacgct

SEQ ID NO: 129 - RNA, 370 nt, Zika virus; identical to SEQ ID NO: 128
  source 1..370: mol_type = genomic RNA

SEQ ID NO: 130 - RNA, 379 nt, Zika virus
  source 1..379: mol_type = genomic RNA
gcaccaattttagtgttgtcaggcctgctagtcagccacagtttggggaaagctgtgcagcctgtaacccccccaggagaagctgggaaaccaagctcatagtcaggccgagaacgccatggcacggaagaagccatgctgcctgtgagcccctcagaggacactgagtcaaaaaaccccacgcgcttggaagcgcaggatgggaaaagaaggtggcgaccttccccacccttcaatctggggcctgaactggagactagctgtgaatctccagcagagggactagtggttagaggagaccccccggaaaacgcaaaacagcatattgacgctgggaaagaccagagactccatgagtttccaccacgctggccgccag

SEQ ID NO: 131 - RNA, 371 nt, Zika virus
  source 1..371: mol_type = genomic RNA
gcaccaattttagtgttgtcaggcctgctagtcagccacagtttggggaaagctgtgcagcctgtaacccccccaggagaagctgggaaaccaagctcatagtcaggccgagaacgccatggcacggaagaagccatgctgcctgtgagcccctcagaggacactgagtcaaaaaaccccacgcgcttggaagcgcaggatgggaaaagaaggtggcgaccttccccacccttcaatctggggcctgaactggagactagctgtgaatctccagcagagggactagtggttagaggagaccccccggaaaacgcaaaacagcatattgacgctgggaaagaccagagactccatgagtttccaccacgctg

SEQ ID NO: 132 - RNA, 370 nt, Zika virus; identical to SEQ ID NO: 128
  source 1..370: mol_type = genomic RNA

SEQ ID NO: 133 - RNA, 371 nt, Zika virus; identical to SEQ ID NO: 131
  source 1..371: mol_type = genomic RNA

SEQ ID NO: 134 - RNA, 379 nt, Zika virus; identical to SEQ ID NO: 130
  source 1..379: mol_type = genomic RNA

SEQ ID NO: 135 - RNA, 370 nt, Zika virus; identical to SEQ ID NO: 128
  source 1..370: mol_type = genomic RNA

SEQ ID NO: 136 - RNA, 370 nt, Zika virus; identical to SEQ ID NO: 128
  source 1..370: mol_type = genomic RNA

SEQ ID NO: 137 - RNA, 379 nt, Zika virus; identical to SEQ ID NO: 130
  source 1..379: mol_type = genomic RNA

SEQ ID NO: 138 - RNA, 370 nt, Zika virus; identical to SEQ ID NO: 128
  source 1..370: mol_type = genomic RNA

SEQ ID NO: 139 - RNA, 376 nt, Zika virus
  source 1..376: mol_type = genomic RNA
gcaccaattttagtgttgtcaggcctgctagtcagccacagtttggggaaagctgtgcagcctgtaacccccccaggagaagctgggaaaccaagctcatagtcaggccgagaacgccatggcacggaagaagccatgctgcctgtgagcccctcagaggacactgagtcaaaaaaccccacgcgcttggaagcgcaggatgggaaaagaaggtggcgaccttccccacccttcaatctggggcctgaactggagactagctgtgaatctccagcagagggactagtggttagaggagaccccccggaaaacgcaaaacagcatattgacgctgggaaagaccagagactccatgagtttccaccacgctggccgc

SEQ ID NO: 140 - RNA, 370 nt, Zika virus; identical to SEQ ID NO: 128
  source 1..370: mol_type = genomic RNA

SEQ ID NO: 141 - RNA, 370 nt, Zika virus; identical to SEQ ID NO: 128
  source 1..370: mol_type = genomic RNA

SEQ ID NO: 142 - RNA, 371 nt, Zika virus; identical to SEQ ID NO: 131
  source 1..371: mol_type = genomic RNA

SEQ ID NO: 143 - RNA, 379 nt, Zika virus; identical to SEQ ID NO: 130
  source 1..379: mol_type = genomic RNA

SEQ ID NO: 144 - RNA, 299 nt, Zika virus; identical to SEQ ID NO: 45
  source 1..299: mol_type = genomic RNA

SEQ ID NO: 145 - RNA, 299 nt, Zika virus; identical to SEQ ID NO: 45
  source 1..299: mol_type = genomic RNA

SEQ ID NO: 146 - RNA, 299 nt, Zika virus; identical to SEQ ID NO: 45
  source 1..299: mol_type = genomic RNA

SEQ ID NO: 147 - RNA, 423 nt, Zika virus
  source 1..423: mol_type = genomic RNA
gcaccaatcttagtgttgtcaggcctgctggtcagccacagcttggggaaagctgtgcagcctgtgacccccccaggagaagctgggaaaccaagcccatagtcaggccgagaacgccatggcacggaagaagccatgctgcctgtgagcccctcagaggacactgagtcaaaaaaccccacgcgcttggaggcgcaggatgggaaaagaaggtggcgaccttccccaccctttaatctggggcctgaactggagatcagctgtggatctccagragagggactagtggttagaggagaccccccggaaaacgcaaaacagcatattgacgctgggaaagaccagagactccatgagtttccaccacgctggccgccaggcacagatcgccgaatagcggcggccggtgtggggaaatccatg

SEQ ID NO: 148 - RNA, 402 nt, Zika virus
  source 1..402: mol_type = genomic RNA
gcaccaattttagtgttgtcaggcctgctagtcagccacagtttggggaaagctgtgcagcctgtaacccccccaggagaagctgggaaaccaagctcatagtcaggccgagaacgccatggcacggaagaagccatgctgcctgtgagcccctcagaggacactgagtcaaaaaaccccacgcgcttggaagcgcaggatgggaaaagaaggtggcgaccttccccacccttcaatctggggcctgaactggagactagctgtgaatctccagcagagggactagtggttagaggagaccccccggaaaacgcaaaacagcatattgacgctgggaaagaccagagactccatgagtttccaccacgctggccgccaggcacagatcgccgaatagcggcg

SEQ ID NO: 149 - RNA, 398 nt, Zika virus
  source 1..398: mol_type = genomic RNA
gcaccaattttagtgttgtcaggcctgctagtcagccacagtttggggaaagctgtgcagcctgtaacccccccaggagaagctgggaaaccaagctcatagtcaggccgagaacgccatggcacggaagaagccatgctgcctgtgagcccctcagaggacactgagtcaaaaaaccccacgcgcttggaagcgcaggatgggaaaagaaggtggcgaccttccccacccttcaatctggggcctgaactggagactagctgtgaatctccagcagagggactagtggttagaggagaccccccggaaaacgcaaaacagcatattgacgctgggaaagaccagagactccatgagtttccaccacgctggccgccaggcacagatcgccgaatagc

SEQ ID NO: 150 - RNA, 394 nt, Zika virus
  source 1..394: mol_type = genomic RNA
gcaccaattttagtgttgtcaggcctgctagtcagccacagtttggggaaagctgtgcagcctgtaacccccccaggagaagctgggaaaccaagctcatagtcaggccgagaacgccatggcacggaagaagccatgctgcctgtgagcccctcagaggacactgagtcaaaaaaccccacgcgcttggaagcgcaggatgggaaaagaaggtggcgaccttccccacccttcaatctggggcctgaactggagactagctgtgaatctccagcagagggactagtggttagaggagaccccccggaaaacgcaaaacagcatattgacgctgggaaagaccagagactccatgagtttccaccacgctggccgccaggcacagatcgccgaa

SEQ ID NO: 151 - RNA, 394 nt, Zika virus; identical to SEQ ID NO: 150
  source 1..394: mol_type = genomic RNA

SEQ ID NO: 152 - RNA, 394 nt, Zika virus; identical to SEQ ID NO: 150
  source 1..394: mol_type = genomic RNA

SEQ ID NO: 153 - RNA, 398 nt, Zika virus; identical to SEQ ID NO: 149
  source 1..398: mol_type = genomic RNA

SEQ ID NO: 154 - RNA, 394 nt, Zika virus; identical to SEQ ID NO: 150
  source 1..394: mol_type = genomic RNA

SEQ ID NO: 155 - RNA, 394 nt, Zika virus; identical to SEQ ID NO: 150
  source 1..394: mol_type = genomic RNA

SEQ ID NO: 156 - RNA, 394 nt, Zika virus; identical to SEQ ID NO: 150
  source 1..394: mol_type = genomic RNA

SEQ ID NO: 157 - RNA, 394 nt, Zika virus; identical to SEQ ID NO: 150
  source 1..394: mol_type = genomic RNA

SEQ ID NO: 158 - RNA, 394 nt, Zika virus; identical to SEQ ID NO: 150
  source 1..394: mol_type = genomic RNA

SEQ ID NO: 159 - RNA, 394 nt, Zika virus; identical to SEQ ID NO: 150
  source 1..394: mol_type = genomic RNA

SEQ ID NO: 160 - RNA, 394 nt, Zika virus; identical to SEQ ID NO: 150
  source 1..394: mol_type = genomic RNA

SEQ ID NO: 161 - RNA, 395 nt, Zika virus
  source 1..395: mol_type = genomic RNA
gcaccaattttagtgttgtcaggcctgctagtcagccacagtttggggaaagctgtgcagcctgtaacccccccaggagaagctgggaaaccaagctcatagtcaggccgagaacgccatggcacggaagaagccatgctgcctgtgagcccctcagaggacactgagtcaaaaaaccccacgcgcttggaagcgcaggatgggaaaagaaggtggcgaccttccccacccttcaatctggggcctgaactggagactagctgtgaatctccagcagagggactagtggttagaggagaccccccggaaaacgcaaaacagcatattgacgctgggaaagaccagagactccatgagtttccaccacgctggccgccaggcacagatcgccgaac

SEQ ID NO: 162 - RNA, 401 nt, Zika virus
  source 1..401: mol_type = genomic RNA
gcaccaattttagtgttgtcaggcctgctagtcagccacagtttggggaaagctgtgcagcctgtaacccccccaggagaagctgggaaaccaagctcatagtcaggccgagaacgccatggcacggaagaagccatgctgcctgtgagcccctcagaggacactgagtcaaaaaaccccacgcgcttggaagcgcaggatgggaaaagaaggtggcgaccttccccacccttcaatctggggcctgaactggagactagctgtgaatctccagcagagggactagtggttagaggagaccccccggaaaacgcaaaacagcatattgacgctgggaaagaccagagactccatgagtttccaccacgctggccgccaggcacagatcgccgaatagcggc

SEQ ID NO: 163 - RNA, 394 nt, Zika virus; identical to SEQ ID NO: 150
  source 1..394: mol_type = genomic RNA

SEQ ID NO: 164 - RNA, 394 nt, Zika virus; identical to SEQ ID NO: 150
  source 1..394: mol_type = genomic RNA

SEQ ID NO: 165 - RNA, 394 nt, Zika virus; identical to SEQ ID NO: 150
  source 1..394: mol_type = genomic RNA

SEQ ID NO: 166 - RNA, 398 nt, Zika virus; identical to SEQ ID NO: 149
  source 1..398: mol_type = genomic RNA

SEQ ID NO: 167 - RNA, 394 nt, Zika virus; identical to SEQ ID NO: 150
  source 1..394: mol_type = genomic RNA

SEQ ID NO: 168 - RNA, 394 nt, Zika virus; identical to SEQ ID NO: 150
  source 1..394: mol_type = genomic RNA

SEQ ID NO: 169 - RNA, 394 nt, Zika virus; identical to SEQ ID NO: 150
  source 1..394: mol_type = genomic RNA

SEQ ID NO: 170 - RNA, 394 nt, Zika virus; identical to SEQ ID NO: 150
  source 1..394: mol_type = genomic RNA

SEQ ID NO: 171 - RNA, 394 nt, Zika virus
  source 1..394: mol_type = genomic RNA
gcaccaattttagtgttgtcaggcctgctagtcagccacagtttggggaaagctgtgcagcctgtaccccccccaggagaagctgggaaaccaagctcatagtcaggccgagaacgccatggcacggaagaagccatgctgcctgtgagcccctcagaggacactgagtcaaaaaaccccacgcgcttggaagcgcaggatgggaaaagaaggtggcgaccttccccacccttcaatctggggcctgaactggagactagctgtgaatctccagcagagggactagtggttagaggagaccccccggaaaacgcaaaacagcatattgacgctgggaaagaccagagactccatgagtttccaccacgctggccgccaggcacagatcgccgaa

SEQ ID NO: 172 - RNA, 394 nt, Zika virus; identical to SEQ ID NO: 150
  source 1..394: mol_type = genomic RNA

SEQ ID NO: 173 - RNA, 394 nt, Zika virus; identical to SEQ ID NO: 150
  source 1..394: mol_type = genomic RNA

SEQ ID NO: 174 - RNA, 394 nt, Zika virus; identical to SEQ ID NO: 150
  source 1..394: mol_type = genomic RNA

SEQ ID NO: 175 - RNA, 394 nt, Zika virus; identical to SEQ ID NO: 150
  source 1..394: mol_type = genomic RNA

SEQ ID NO: 176 - RNA, 397 nt, Zika virus
  source 1..397: mol_type = genomic RNA
gcaccaattttagtgttgtcaggcctgctagtcagccacagtttggggaaagctgtgcagcctgtaacccccccaggagaagctgggaaaccaagctcatagtcaggccgagaacgccatggcacggaagaagccatgctgcctgtgagcccctcagaggacactgagtcaaaaaaccccacgcgcttggaagcgcaggatgggaaaagaaggtggcgaccttccccacccttcaatctggggcctgaactggagactagctgtgaatctccagcagagggactagtggttagaggagaccccccggaaaacgcaaaacagcatattgacgctgggaaagaccagagactccatgagtttccaccacgctggccgccaggcacagatcgccgaatag

SEQ ID NO: 177 - RNA, 394 nt, Zika virus; identical to SEQ ID NO: 150
  source 1..394: mol_type = genomic RNA

SEQ ID NO: 178 - RNA, 394 nt, Zika virus; identical to SEQ ID NO: 150
  source 1..394: mol_type = genomic RNA

SEQ ID NO: 179 - RNA, 394 nt, Zika virus; identical to SEQ ID NO: 150
  source 1..394: mol_type = genomic RNA

SEQ ID NO: 180 - RNA, 394 nt, Zika virus; identical to SEQ ID NO: 150
  source 1..394: mol_type = genomic RNA

SEQ ID NO: 181 - RNA, 394 nt, Zika virus; identical to SEQ ID NO: 150
  source 1..394: mol_type = genomic RNA

SEQ ID NO: 182 - RNA, 394 nt, Zika virus; identical to SEQ ID NO: 150
  source 1..394: mol_type = genomic RNA

SEQ ID NO: 183 - RNA, 398 nt, Zika virus; identical to SEQ ID NO: 149
  source 1..398: mol_type = genomic RNA

SEQ ID NO: 184 - RNA, 394 nt, Zika virus; identical to SEQ ID NO: 150
  source 1..394: mol_type = genomic RNA

SEQ ID NO: 185 - RNA, 394 nt, Zika virus; identical to SEQ ID NO: 150
  source 1..394: mol_type = genomic RNA

SEQ ID NO: 186 - RNA, 394 nt, Zika virus; identical to SEQ ID NO: 150
  source 1..394: mol_type = genomic RNA

SEQ ID NO: 187 - RNA, 394 nt, Zika virus; identical to SEQ ID NO: 150
  source 1..394: mol_type = genomic RNA

SEQ ID NO: 188 - RNA, 394 nt, Zika virus; identical to SEQ ID NO: 150
  source 1..394: mol_type = genomic RNA

SEQ ID NO: 189 - RNA, 394 nt, Zika virus; identical to SEQ ID NO: 150
  source 1..394: mol_type = genomic RNA

SEQ ID NO: 190 - RNA, 394 nt, Zika virus; identical to SEQ ID NO: 150
  source 1..394: mol_type = genomic RNA

SEQ ID NO: 191 - RNA, 394 nt, Zika virus; identical to SEQ ID NO: 150
  source 1..394: mol_type = genomic RNA

SEQ ID NO: 192 - RNA, 398 nt, Zika virus; identical to SEQ ID NO: 149
  source 1..398: mol_type = genomic RNA

SEQ ID NO: 193 - RNA, 394 nt, Zika virus; identical to SEQ ID NO: 150
  source 1..394: mol_type = genomic RNA

SEQ ID NO: 194 - RNA, 395 nt, Zika virus; identical to SEQ ID NO: 161
  source 1..395: mol_type = genomic RNA

SEQ ID NO: 195 - RNA, 394 nt, Zika virus; identical to SEQ ID NO: 150
  source 1..394: mol_type = genomic RNA

SEQ ID NO: 196 - RNA, 398 nt, Zika virus; identical to SEQ ID NO: 149
  source 1..398: mol_type = genomic RNA

SEQ ID NO: 197 - RNA, 394 nt, Zika virus; identical to SEQ ID NO: 150
  source 1..394: mol_type = genomic RNA

SEQ ID NO: 198 - RNA, 401 nt, Zika virus; identical to SEQ ID NO: 162
  source 1..401: mol_type = genomic RNA

SEQ ID NO: 199 - RNA, 394 nt, Zika virus; identical to SEQ ID NO: 150
  source 1..394: mol_type = genomic RNA

SEQ ID NO: 200 - RNA, 398 nt, Zika virus; identical to SEQ ID NO: 149
  source 1..398: mol_type = genomic RNA

SEQ ID NO: 201 - RNA, 394 nt, Zika virus; identical to SEQ ID NO: 150
  source 1..394: mol_type = genomic RNA

SEQ ID NO: 202 - RNA, 394 nt, Zika virus; identical to SEQ ID NO: 150
  source 1..394: mol_type = genomic RNA

SEQ ID NO: 203 - RNA, 401 nt, Zika virus; identical to SEQ ID NO: 162
  source 1..401: mol_type = genomic RNA

SEQ ID NO: 204 - RNA, 394 nt, Zika virus; identical to SEQ ID NO: 150
  source 1..394: mol_type = genomic RNA

SEQ ID NO: 205 - RNA, 394 nt, Zika virus; identical to SEQ ID NO: 150
  source 1..394: mol_type = genomic RNA

SEQ ID NO: 206 - RNA, 394 nt, Zika virus; identical to SEQ ID NO: 150
  source 1..394: mol_type = genomic RNA

SEQ ID NO: 207 - RNA, 394 nt, Zika virus
  source 1..394: mol_type = genomic RNA
gcaccaattttagtgttgtcaggcctgctagtcagccacagtttggggaaagctgtgcagcctgtaacccccccaggagaagctgggaaaccaagctcatagtcaggccgagaacgccatggcacggaagaagccatgctgcctgtgagcccctcagaggacactgagtcaaaaaaccccacgcgcttggaagcgcaggatgggaaaagaaggtggcgaccttccccacccttcaatctggggcctgaactggagactagctgtgaatctccagcagagggactagaggttagaggagaccccccggaaaacgcaaaacagcatattgacgctgggaaagaccagagactccatgagtttccaccacgctggccgccaggcacagatcgccgaa

SEQ ID NO: 208 - RNA, 394 nt, Zika virus; identical to SEQ ID NO: 150
  source 1..394: mol_type = genomic RNA

SEQ ID NO: 209 - RNA, 394 nt, Zika virus; identical to SEQ ID NO: 150
  source 1..394: mol_type = genomic RNA

SEQ ID NO: 210 - RNA, 400 nt, Zika virus
  source 1..400: mol_type = genomic RNA
gcaccaattttagtgttgtcaggcctgctagtcagccacagtttggggaaagctgtgcagcctgtaacccccccaggagaagctgggaaaccaagctcatagtcaggccgagaacgccatggcacggaagaagccatgctgcctgtgagcccctcagaggacactgagtcaaaaaaccccacgcgcttggaagcgcaggatgggaaaagaaggtggcgaccttccccacccttcaatctggggcctgaactggagactagctgtgaatctccagcagagggactagtggttagaggagaccccccggaaaacgcaaaacagcatattgacgctgggaaagaccagagactccatgagtttccaccacgctggccgccaggcacagatcgccgaatagcgg

SEQ ID NO: 211 - RNA, 398 nt, Zika virus; identical to SEQ ID NO: 149
  source 1..398: mol_type = genomic RNA

SEQ ID NO: 212 - RNA, 390 nt, Zika virus
  source 1..390: mol_type = genomic RNA
gcaccaatcttagtgttgtcaggcctgctagtcagccacagcttggggaaagctgtgcagcctgtgacccccccaggagaagctgggaaaccaagcccatagtcaggccgagaacgccatggcacggaagaagccatgctgcctgtgagcccctccgaggacactgagtcaaaaaaccccacgcgcttggaggcgcaggatgggaaaagaaggtggcgaccttccccacccttcaatctggggcctgaactggagatcagctgtggatctccagaagagggactagtggttagaggagaccccccggcaaacgcaaaacagcatattgacgctgggaaagaccagagactccatgagtttccaccacgctggccgccaggcacagatcgc

SEQ ID NO: 213 - RNA, 428 nt, Zika virus
  source 1..428: mol_type = genomic RNA
gcaccaatcttagtgttgtcaggcctgctagtcagccacagcttggggaaagctgtgcagcctgtgacccccccaggagaagctgggaaaccaagcctatagtcaggccgagaacgccatggcacggaagaagccatgctgcctgtgagcccctcagaggacactgagtcaaaaaaccccacgcgcttggaggcgcaggatgggaaaagaaggtggcgaccttccccacccttcaatctggggcctgaactggagatcagctgtggatctccagaagagggactagtggttagaggagaccccccggaaaacgcaaaacagcatattgacgctgggaaagaccagagactccatgagtttccaccacgctggccgccaggcacagatcgccgaatagcggcggccggtgtggggaaatccatgggtct

SEQ ID NO: 214 - RNA, 428 nt, Zika virus
  source 1..428: mol_type = genomic RNA
gcaccaatcttagtgttgtcaggcctgctagtcagccacagcttggggaaagctgtgcagcctgtgacccccccaggagaagctgggaaaccaagcctatagtcaggccgagaacgccatggcacggaagaagccatgctgcctgtgagcccctcagaggacactgagtcaaaaaaccccacgcgcttggaggcgcaggatgggaaaagaaggtggcgaccttccccaccctttaatctggggcctgaactggagatcagctgtggatctccagaagagggactagtggttagaggagaccccccggaaaacgcaaaacagcatattgacgctgggaaagaccagagactccatgagtttccaccacgctggccgccaggcacagatcgccgaatagcggcggccggtgtggggaaatccatgggtct

SEQ ID NO: 215 - RNA, 428 nt, Zika virus; identical to SEQ ID NO: 214
  source 1..428: mol_type = genomic RNA

SEQ ID NO: 216 - RNA, 786 nt, Zika virus
  source 1..786: mol_type = genomic RNA
gcaccaatcttagtgttgtcaggcctgctagtcagccacagcttggggaaagctgtgcagcctgtgacccccccaggagaagctgggaaaccaagcctatagtcaggccgagaacgccatggcacggaagaagccatgctgcctgtgagcccctcagaggacactgagtcaaaaaaccccacgcgcttggaggcgcaggatgggaaaagaaggtggcgaccttccccacccttcaatctggggcctgaactggagatcagctgtggatctccagaagagggactagtggttagaggaggtccacagaagggacctccgcagcatattgacgctgggaaagaccagagactccatgagtttccaccacgctggccgccaggcacagatcgccgattaagaattccaccaaaaagaattctgctgccataccatctccgaggatgtcccataaacttggttgcagagttttgtgaaatgttgcactccagtagaaggcagcagactaggctgggcgtggcggctcatgcctgtaatcccagcactttgggaggttgaggcaggtggatcacctgaggtcaggagttcgagaccagcttggccaacatggtgaaaccccgtctctactagaaacacaaacaattagccaggcatggtggcgggcgctgtaatcctagctactcgggagactgaggcaggagaattgcttgaacccaggaggcagaggttgcagtgagctgagatcgcaccattgcactccagcctgggcgacagagcaagactccgtct

SEQ ID NO: 217 - RNA, 396 nt, Zika virus
  source 1..396: mol_type = genomic RNA
gcaccaatcctaatgttgtcaggcctgctagtcagccacagcttggggaaagctgtgcagcctgtgacccccccaggagaagctgggaaaccaagcctatagtcaggccgagaacgccatggcacggaagaagccatgctgcctgtgagcccctcagaggacactgagtcaaaaaaccccacgcgcttggaggcgcaggatgggaaaagaaggtggcgaccttccccacccttcaatctggggcctgaactggagatcagctgtggatctccagaagagggactagtggttagaggagaccccccggaaaacgcaaaacagcatattgacgctgggaaagaccagagactccatgagtttccaccacgctggccgccaggcacagatcgccgaata

SEQ ID NO: 218 - RNA, 428 nt, Zika virus
  source 1..428: mol_type = genomic RNA
gcaccaatcttagtgttgtcaggcctgctagtcagccacagcttggggaaagctgtgcagcctgtgacccccccaggagaagctgggaaaccaagcctatagtcaggccgagaacgccatggcacggaagaagccatgctgcctgtgagcccctcagaggacactgagtcaaaaaaccccacgcgcatggaggcgcaggatgggaaaagaaggtggcgaccttccccacccttcaatctggggcctgaactggagatcagctgtggatctccagaagagggactagtggttagaggagaccccccggaaaacgcaaaacagcatattgacgctgggaaagaccagagactccatgagtttccaccacgctggccgccaggcacagatcgccgaatagcggcggccggtgtggggaaatccatgggtct

SEQ ID NO: 219 - RNA, 429 nt, Zika virus; identical to SEQ ID NO: 16
  source 1..429: mol_type = genomic RNA

SEQ ID NO: 220 - RNA, 424 nt, Zika virus; identical to SEQ ID NO: 80
  source 1..424: mol_type = genomic RNA

SEQ ID NO: 221 - RNA, 429 nt, Zika virus; identical to SEQ ID NO: 16
  source 1..429: mol_type = genomic RNA

SEQ ID NO: 222 - RNA, 429 nt, Zika virus; identical to SEQ ID NO: 16
  source 1..429: mol_type = genomic RNA

SEQ ID NO: 223 - RNA, 429 nt, Zika virus; identical to SEQ ID NO: 16
  source 1..429: mol_type = genomic RNA

SEQ ID NO: 224 - RNA, 429 nt, Zika virus; identical to SEQ ID NO: 16
  source 1..429: mol_type = genomic RNA

SEQ ID NO: 225 - RNA, 429 nt, Zika virus; identical to SEQ ID NO: 16
  source 1..429: mol_type = genomic RNA

SEQ ID NO: 226 - RNA, 429 nt, Zika virus; identical to SEQ ID NO: 16
  source 1..429: mol_type = genomic RNA

SEQ ID NO: 227 - RNA, 429 nt, Zika virus
  source 1..429: mol_type = genomic RNA
gcaccaattttagtgttgtcaggcctgctagtcagccacagtttggggaaagctgtgcagcctgtaacccccccaggagaagctgggaaaccaagctcatagtcaggccgagaacgccatggcacggaagaagccatgctgcctgtgagcccctcagaggacactgagtcaaaaaaccccacgcgcttggaagcgcaggatgggaaaagaaggtggcgaccttccccacccttcaatctggggcctgaactggagactagctgtgaatctccagcagagggactagtggttagaggagaccccccggaaaacgcaaaacagcatattgacgctgggaaagaccagagactccatgagtttccaccacgctggccgccaggcacagatcgccgaacttcggcggccggtgtggggaaatccatggtttct

SEQ ID NO: 228 - RNA, 428 nt, Zika virus; identical to SEQ ID NO: 20
  source 1..428: mol_type = genomic RNA

SEQ ID NO: 229 - RNA, 423 nt, Zika virus
  source 1..423: mol_type = genomic RNA
gcaccaatcttagtgttgtcaggcctgctagtcagccacagcttggggaaagctgtgcagcctgtgacccccccaggagaagctgggaaaccaagcccatagtcaggccgagaacgccatggcacggaagaagccatgctgcctgtgagcccctcagaggacactgagtcaaaaaaccccacgcgcttggaggcgcaggatgggaaaagaaggtggcgaccttccccacccttcaatctggggcctgaactggagatcagctgtggatctccagaagagggactagtggttagaggagaccccccggaaaacgcaaaacagcatattgacgctgggaaagaccagagactccatgagtttccaccacgctggccgccaggcacagatcgccgartagcggcggccggtgtggggaaatccatg

SEQ ID NO: 230 - RNA, 423 nt, Zika virus
  source 1..423: mol_type = genomic RNA
gcgccaatcttagtgttgtcaggcctgctagtcagccacagcttggggaaagctgtgcagcctgtgacccccccaggagaagctgggaaaccaagcccatagtcaggccgagaacgccatggcacggaagaagccatgctgcctgtgagcccctcagaggacactgagtcaaaaaaccccacgcgcttggaggcgcaggatgggaaaagaaggtggcgaccttccccaccctttaatctggggcctgaactggagatcagctgtggatctccagaagagggactagtggttagaggagaccccccggaaaacgcaaaacagcatattgacgctgggaaagaccagagactccatgagtttccaccacgctggccgccaggcacagatcgccgartagcggcggccggtgtggggaaatccatg

SEQ ID NO: 231 - RNA, 428 nt, Zika virus
  source 1..428: mol_type = genomic RNA
gcaccaatcttagtgttgtcaggcctgctagtcagccacagcttggggaaagctgtgcagcctgtgacccccccaggagaagctgggaaaccaagcccatagtcaggccgagaacgccatggcacggaagaagccatgctgcctgtgagcccctcagaggacactgagtcaaaaaaccccacgcgcttggaggcgcaggatgggaaaagaaggtggcgaccttccccaccctttaatctggggcctgaactggagatcagctgtggatctccagaagagggactagtggttagaggagaccccccggaaaacgcaaaacagcatattgacgctgggaaagaccagagactccatgagtttccaccacgctggccgccaggcacagatcgccgadtagcggcggccggtgtggggaaatccatgggtct

SEQ ID NO: 232 - RNA, 381 nt, Zika virus
  source 1..381: mol_type = genomic RNA
gcaccaatcttaatgttgtcaggcctgctagtcagccacagcttggggaaagctgtgcagcctgtgacccccccaggagaagctgggaaaccaagcctatagtcaggccgagaacgccatggcacggaagaagccatgctgcctgtgagcccctcagaggacactgagtcaaaaaaccccacgcgcttggaggcgcaggatgggaaaagaaggtggcgaccttccccacccttcaatctggggcctgaactggagatcagctgtggatctccagaagagggactagtggttagaggagaccccccggaaaacgcaaaacagcatattgacgctgggaaagaccagagactccatgagtttccaccacgctggccgccaggc

SEQ ID NO: 233 - RNA, 345 nt, Zika virus
  source 1..345: mol_type = genomic RNA
gcaccaatcttaatgttgtcaggcctgctagtcagccacagcttggggaaagctgtgcagcctgtgacccccccaggagaagctgggaaaccaagcctatagtcaggccgagaacgccatggcacggaagaagccatgctgcctgtgagcccctcagaggacactgagtcaaaaaaccccacgcgcttggaggcgcaggatgggaaaagaaggtggcgaccttccccacccttcaatctggggcctgaactggagatcagctgtggatctccagaagagggactagtggttagaggagaccccccggaaaacgcaaaacagcatattgacgctgggaaagaccag

SEQ ID NO: 234 - RNA, 381 nt, Zika virus; identical to SEQ ID NO: 232
  source 1..381: mol_type = genomic RNA

SEQ ID NO: 235 - RNA, 66 nt, Zika virus
  source 1..66: mol_type = genomic RNA
gcaccaatcttaatgttgtcaggcctgctagtcagccacagcttggggaaagctgtgcagcctgtg

SEQ ID NO: 236 - RNA, 299 nt, Zika virus; identical to SEQ ID NO: 45
  source 1..299: mol_type = genomic RNA

SEQ ID NO: 237 - RNA, 381 nt, Zika virus; identical to SEQ ID NO: 232
  source 1..381: mol_type = genomic RNA

SEQ ID NO: 238 - RNA, 325 nt, Zika virus
  source 1..325: mol_type = genomic RNA
gcaccaatcttaatgttgtcaggcctgctagtcagccacagcttggggaaagctgtgcagcctgtgacccccccaggagaagctgggaaaccaagcctatagtcaggccgagaacgccatggcacggaagaagccatgctgcctgtgagcccctcagaggacactgagtcaaaaaaccccacgcgcttggaggcgcaggatgggaaaagaaggtggcgaccttccccacccttcaatctggggcctgaactggagatcagctgtggatctccagaagagggactagtggttagaggagaccccccggaaaacgcaaaacagcata

SEQ ID NO: 239 - RNA, 381 nt, Zika virus; identical to SEQ ID NO: 232
  source 1..381: mol_type = genomic RNA

SEQ ID NO: 240 - RNA, 298 nt, Zika virus
  source 1..298: mol_type = genomic RNA
gcaccaatcttaatgttgtcaggcctgctagtcagccacagcttggggaaagctgtgcagcctgtgacccccccaggagaagctgggaaaccaagcctatagtcaggccgagaacgccatggcacggaagaagccatgctgcctgtgagcccctcagaggacactgagtcaaaaaaccccacgcgcttggaggcgcaggatgggaaaagaaggtggcgaccttccccacccttcaatctggggcctgaactggagatcagctgtggatctccagaagagggactagtggttagaggag

SEQ ID NO: 241 - RNA, 381 nt, Zika virus; identical to SEQ ID NO: 232
  source 1..381: mol_type = genomic RNA

SEQ ID NO: 242 - RNA, 321 nt, Zika virus
  source 1..321: mol_type = genomic RNA
gcaccaatcttaatgttgtcaggcctgctagtcagccacagcttggggaaagctgtgcagcctgtgacccccccaggagaagctgggaaaccaagcctatagtcaggccgagaacgccatggcacggaagaagccatgctgcctgtgagcccctcagaggacactgagtcaaaaaaccccacgcgcttggaggcgcaggatgggaaaagaaggtggcgaccttccccacccttcaatctggggcctgaactggagatcagctgtggatctccagaagagggactagtggttagaggagaccccccggaaaacgcaaaacag

SEQ ID NO: 243 - RNA, 375 nt, Zika virus
  source 1..375: mol_type = genomic RNA
gcaccaatcttaatgttgtcaggcctgctagtcagccacagcttggggaaagctgtgcagcctgtgacccccccaggagaagctgggaaaccaagcctatagtcaggccgagaacgccatggcacggaagaagccatgctgcctgtgagcccctcagaggacactgagtcaaaaaaccccacgcgcttggaggcgcaggatgggaaaagaaggtggcgaccttccccacccttcaatctggggcctgaactggagatcagctgtggatctccagaagagggactagtggttagaggagaccccccggaaaacgcaaaacagcatattgacgctgggaaagaccagagactccatgagtttccaccacgctggccg

SEQ ID NO: 244 - RNA, 338 nt, Zika virus
  source 1..338: mol_type = genomic RNA
gcaccaatcttagtgttgtcaggcctgctagtcagccacagcttggggaaagctgtgcagcctgtgacccccccaggagaagctgggaaaccaagcccatagtcaggccgagaacgccatggcacggaagaagccatgctgcctgtgagcccctcagaggacactgagtcaaaaaaccccacgcgcttggaggcgcagggtgggaagagaaggtggcgaccttccccacccttcaatctggggcctgaactggagatcagctgtggatctccagaagagggactagtggttagaggagaccccccggaaaacgcaaaacagcatattgacgctgggaa

SEQ ID NO: 245 - RNA, 299 nt, Zika virus; identical to SEQ ID NO: 45
  source 1..299: mol_type = genomic RNA

SEQ ID NO: 246 - RNA, 419 nt, Zika virus
  source 1..419: mol_type = genomic RNA
gcaccaatcttaatgttgtcaggcctgctagtcagccacagcttggggaaagctgtgcagcctgtgacccccccaggagaagctgggaaaccaagcctatagtcaggccgagaacgccatggcacggaagaagccatgctgcctgtgagcccctcagaggacactgagtcaaaaaaccccacgcgcttggaggcgcaggatgggaaaagaaggtggcgaccttccccacccttcaatctggggcctgaactggagatcagctgtggatctccagaagagggactagtggttagaggagaccccccggaaaacgcaaaacagcatattgacgctgggaaagaccagagactccatgagtttccaccacgctggccgccaggcacagatcgccgaatagcggcggccggtgtggggaaatc

SEQ ID NO: 247 - RNA, 428 nt, Zika virus; identical to SEQ ID NO: 20
  source 1..428: mol_type = genomic RNA

SEQ ID NO: 248 - RNA, 269 nt, Zika virus
  source 1..269: mol_type = genomic RNA
gcaccaatcttagtgttgtcaggcctgctagtcagccacagcttggggaaagctgtgcagcctgtgacccccccaggagaagctgggaaaccaagcctatagtcaggccgagaacgccatggcacggaagaagccatgctgcctgtgagcccctcagaggacactgagtcaaaaaaccccacgcgcttggaggcgcaggatgggaaaagaaggtggcgaccttccccacccttcaatctggggcctgaactggagatcagctgtggatc

SEQ ID NO: 249 - RNA, 269 nt, Zika virus; identical to SEQ ID NO: 248
  source 1..269: mol_type = genomic RNA

SEQ ID NO: 250 - RNA, 428 nt, Zika virus
  source 1..428: mol_type = genomic RNA
gcaccaatcttaatgttgtcaggcctgctagtcagccacagcttggggaaagctgtgcagcctgtgacccccccaggagaagctgggaaaccaagcctatagtcaggccgagaacgccatggcacggaagaagccatgctgcctgtgagcccctcagaggacactgagtcaaaaaaccccacgcgcttggaggcgcaggatgggaaaagaaggtggcgaccttccccacccttcaatctggggcctgaactggagatcagctgtggatctccagaagagggactagtggttagaggagaccccccggaaaacgcgaaacagcatattgacgctgggaaagaccagagactccatgagtttccaccacgctggccgccaggcacagatcgccgaatagcggcggccggtgtggggaaatccatgggtct

SEQ ID NO: 251 - RNA, 375 nt, Zika virus
  source 1..375: mol_type = genomic RNA
gtaccaattttagtgttgtcaggcctgctagtcagccacagtttggggaaaactgtgcagcctgtaacccccccaggagaagctgggaaaccaagctcatagtcaggccgagaacgccatggtacggaagaagccatgctgcctgtgagcccctcagaggacactgagtcaaaaaaccccatgcgcttggtagcgcaggatgggaaaagaaggtggcgaccttccccaccctttaatctggggcctgaactggagattagctgtgaatctccagcagagggactagtggttagaggagaccccccggaaaacgcaaaacagcatattgacgctgggaaagaccagagactccatgagtttccaccacgctggccg

SEQ ID NO: 252 - RNA, 428 nt, Zika virus; identical to SEQ ID NO: 20
  source 1..428: mol_type = genomic RNA

SEQ ID NO: 253 - RNA, 428 nt, Zika virus; identical to SEQ ID NO: 126
  source 1..428: mol_type = genomic RNA

SEQ ID NO: 254 - RNA, 382 nt, Zika virus
  source 1..382: mol_type = genomic RNA
gcaccaatcttaatgttgtcaggcctgctagtcagccacagcttggggaaagctgtgcagcctgtgacccccccaggagaagctgggaaaccaagcctatagtcaggccgagaacgccatggcacggaagaagccatgctgcctgtgagcccctcagaggacactgagtcaaaaaaccccacgcgcttggaggcgcaggatgggaaaagaaggtggcgaccttccccacccttcaatctggggcctgaactggagatcagctgtggatctccagaagagggactagtggttagaggagaccccccggaaaacgcaaaacagcatattgacgctgggaaagaccagagactccatgagtttccaccacgctggccgccaggca

SEQ ID NO: 255 - RNA, 277 nt, Zika virus
  source 1..277: mol_type = genomic RNA
gcaccaatcttaatgttgtcaggcctgctagtcagccacagcttggggaaagctgtgcagcctgtgacccccccaggagaagctgggaaaccaagcctatagtcaggccgagaacgccatggcacggaagaagccatgctgcctgtgagcccctcagaggacactgagtcaaaaaaccccacgcgcttggaggcgcaggatgggaaaagaaggtggcgaccttccccacccttcaatctggggcctgaactggagatcagctgtggatctccagaag

SEQ ID NO: 256 - RNA, 258 nt, Zika virus
  source 1..258: mol_type = genomic RNA
gcaccaatcttaatgttgtcaggcctgctagtcagccacagcttggggaaagctgtgcagcctgtgacccccccaggagaagctgggaaaccaagcctatagtcaggccgagaacgccatggcacggaagaagccatgctgcctgtgagcccctcagaggacactgagtcaaaaaaccccacgcgcttggaggcgcaggatgggaaaagaaggtggcgaccttccccacccttcaatctggggcctgaactggagatc

SEQ ID NO: 257 - RNA, 428 nt, Zika virus
  source 1..428: mol_type = genomic RNA
gcaccaatcttagtgttgtcaggcctgctagtcagccacagcttggggaaagctgtgcagcctgtgacccccccaggagaagctgggaaaccaagcctatagtcaggccgagaacgccatggcacggaagaagccatgctgcctgtgagcccctcagaggacactgagtcaaaaaaccccacgcgcttggaggcgcaggatgggaaaagaaggtggcgaccttccccacccttcaatctggggcctgaactggagatcagctgtggatctccagaagagggactagtggttagaggagaccccccggaaaacgcaaaacagcatattgacgctgggaaagaccagagactccatgagtttccaccacgctggccgccaggcacagatcgccgaatagcggcggccggtgtggggaaatccatggtttc

SEQ ID NO: 258 - RNA, 425 nt, Zika virus
  source 1..425: mol_type = genomic RNA
gcaccaatcttaatgttgtcaggcctgctagtcagccacagcttggggaaagctgtgcagcctgtgacccccccaggagaagctgggaaaccaagcctatagtcaggccgagaacgccatggcacggaagaagccatgctgcctgtgagcccctcagaggacactgagtcaaaaaaccccacgcgcttggaggcgcaggatgggaaaagaaggtggcgaccttccccacccttcaatctggggcctgaactggagatcagctgtggatctccagaagagggactagtggttagaggagaccccccggaaaacgcaaaacagcatattgacgctgggaaagaccagagactccatgagtttccaccacgctggccgccaggcacagatcgccgaatagcggcggccggtgtggggaaatccatggg

SEQ ID NO: 259 - RNA, 429 nt, Zika virus; identical to SEQ ID NO: 16
  source 1..429: mol_type = genomic RNA

SEQ ID NO: 260 - RNA, 433 nt, Zika virus
  source 1..433: mol_type = genomic RNA
gcaccaatcctaatgttgtcaggcctgctagtcagccacagcttggggaaagctgtgcagcctgtgacccccccaggagaagctgggaaaccaagcctatagtcaggccgagaacgccatggcacggaagaagccatgctgcctgtgagcccctcagaggacactgagtcaaaaaaccccacgcgcttggaggcgcaggatgggaaaagaaggtggcgaccttccccacccttcaatctggggcctgaactggagatcagctgtggatctccagaagagggactagtggttagaggagaccccccggaaaacgcaaaacagcatattgacgctgggaaagaccagagactccatgagtttccaccacgctggccgccaggcacagatcgccgaatagcggcggccggtgtggggaaatccatgggagatcgga

SEQ ID NO: 261 - RNA, 427 nt, Zika virus
  source 1..427: mol_type = genomic RNA
gcaccaatcctaatgttgtcaggcctgctagtcagccacagcttggggaaagctgtgcagcctgtgacccccccaggagaagctgggaaaccaagcctatagtcaggccgagaacgccatggcacggaagaagccatgctgcctgtgagcccctcagaggacactgagtcaaaaaaccccacgcgcttggaggcgcaggatgggaaaagaaggtggcgaccttccccacccttcaatctggggcctgaactggagatcagctgtggatctccagaagagggactagtggttagaggagaccccccggaaaacgcaaaacagcatattgacgctgggaaagaccagagactccatgagtttccaccacgctggccgccaggcacagatcgccgaatagcggcggccggtgtggggaaatccatgggtc

SEQ ID NO: 262 - RNA, 429 nt, Zika virus; identical to SEQ ID NO: 227
  source 1..429: mol_type = genomic RNA

SEQ ID NO: 263 - RNA, 394 nt, Zika virus
  source 1..394: mol_type = genomic RNA
gcaccaatcttaatgttgtcaggcctgctagtcagccacagcttggggaaagctgtgcagcctgtgacccccccaggagaagctgggaaaccaagcctatagtcaggccgagaacgccatggcacggaagaagccatgctgcctgtgagcccctcagaggacactgagtcaaaaaaccccacgcgcttggaggcgcaggatgggaaaagaaggtggcgaccttccccacccttcaacctggggcctgaactggagatcagctgtggatctccagaagagggactagtggttagaggagaccccccggaaaacgcaaaacagcatattgacgctgggaaagaccagagactccatgagtttccaccacgctggccgccaggcacagatcgccgaa

SEQ ID NO: 264 - RNA, 382 nt, Zika virus; identical to SEQ ID NO: 254
  source 1..382: mol_type = genomic RNA

SEQ ID NO: 265 - RNA, 494 nt, Zika virus
  source 1..494: mol_type = genomic RNA
gcaccaatcttaatgttgtcaggcctgctagtcagccacagcttggggaaagctgtgcagcctgtgacccccccaggagaagctgggaaaccaagcctatagtcaggccgagaacgccatggcacggaagaagccatgctgcctgtgagcccctcagaggacactgagtcaaaaaaccccacgcgcttggaggcgcaggatgggaaaagaaggtggcgaccttccccacccttcaatctggggcctgaactggagatcagctgtggatctccagaagagggactagtggttagaggagaccccccggaaaacgcaaaacagcatattgacgctgggaaagaccagagactccatgagtttccaccacgctggccgccaggcacagatcgccgaatagcggcggccagtgtggggaaatccatgggccccagctgtggatctccagaagagggactagtggttagaggagaccccccggaaaacgcaaaacagcg

SEQ ID NO: 266 - RNA, 428 nt, Zika virus; identical to SEQ ID NO: 213
  source 1..428: mol_type = genomic RNA

SEQ ID NO: 267 - RNA, 306 nt, Zika virus
  source 1..306: mol_type = genomic RNA
gcaccaatcttaatgttgtcaggcctgctagtcagccacagcttggggaaagctgtgcagcctgtgacccccccaggagaagctgggaaaccaagcctatagtcaggccgagaacgccatggcacggaagaagccatgctgcctgtgagcccctcagaggacactgagtcaaaaaaccccacgcgcttggaggcgcaggatgggaaaagaaggtggcgaccttccccacccttcaatctggggcctgaactggagatcagctgtggatctccagaagagggactagtggttagaggagaccccccg

SEQ ID NO: 268 - RNA, 375 nt, Zika virus; identical to SEQ ID NO: 243
  source 1..375: mol_type = genomic RNA

SEQ ID NO: 269 - RNA, 429 nt, Zika virus; identical to SEQ ID NO: 16
  source 1..429: mol_type = genomic RNA

SEQ ID NO: 270 - RNA, 428 nt, Zika virus; identical to SEQ ID NO: 126
  source 1..428: mol_type = genomic RNA

SEQ ID NO: 271 - RNA, 428 nt, Zika virus
  source 1..428: mol_type = genomic RNA
gcaccaattttagtgttgtcaggcctgctagtcagccacagcttggggaaagctgtgcagcctgtgacccccccaggagaagctgggaaaccaagcccatagtcaggccgagaacgccatggcacggaagaagccatgctgcctgtgagcccctcagaggacactgagtcaaaaaaccccacgcgcttggaggcgcaggatgggaaaagaaggtggcgaccttccccaccctccaatctggggcctgaactggagatcagctgtggatctccaggagagggactagcggttagaggagaccccccggaaaacgcaaaacagcatattgacgctgggaaagaccagagactccatgagtttccaccacgctggccgccaggcacagatcgccgaatagcggcggccggtgtggggaaatccatgggtct

SEQ ID NO: 272 - RNA, 428 nt, Zika virus
  source 1..428: mol_type = genomic RNA
gcaccaatcttaacgttgtcaggcctgctagtcagccacagcttggggaaagctgtgcagcctgtgacccccccaggagaagctgggaaaccaagcctatagtcaggccgagaacgccatggcacggaagaagccatgctgcctgtgagcccctcagaggacactgagtcaaaaaaccccacgcgcttggaggcgcaggatgggaaaagaaggtggcgaccttccccacccttcaatctggggcctgaactggagatcagctgtggatctccagaagagggactagtggttagaggagaccccccggaaaacgcaaaacagcatattgacgctgggaaagaccagagactccatgagtttccaccacgctggccgccaggcacagatcgccgaatagcggcggccggtgtggggaaatccatgggtct

SEQ ID NO: 273 - RNA, 326 nt, Zika virus
  source 1..326: mol_type = genomic RNA
gcaccaatcttaatgttgtcaggcctgctagtcagccacagcttggggaaagctgtgcagcctgtgacccccccaggagaagctgggaaaccaagcctatagtcaggccgagaacgccatggcacggaagaagccatgctgcctgtgagcccctcagaggacactgagtcaaaaaaccccacgcgcttggaggcgcaggatgggaaaagaaggtggcgaccttccccacccttcaatctggggcctgaactggagatcagctgtggatctccagaagagggactagtggttagaggagaccccccggaaaacgcaaaacagcatat

SEQ ID NO: 274 - RNA, 415 nt, Zika virus
  source 1..415: mol_type = genomic RNA
gcaccaatcttagtgttgtcaggcctgctagtcagccacagcttggggaaagctgtgcagcctgtgacccccccaggagaagctgggaaaccaagcctatagtcaggccgagaacgccatggcacggaagaagccatgctgcctgtgagcccctcagaggacactgagtcaaaaaaccccacgcgcttggaggcgcaggatgggaaaagaaggtggcgaccttccccaccctttaatctggggcctgaactggagatcagctgtggatctccagaagagggactagtggttagaggagaccccccggaaaacgcaaaacagcatattgacgctgggaaagaccagagactccatgagtttccaccacgctggccgccaggcacagatcgccgaatagcggcggccggtgtgggga

SEQ ID NO: 275 - RNA, 421 nt, Zika virus
  source 1..421: mol_type = genomic RNA
gcatcaatttcaatgttgtcaggcctgctagtcagccacagtttggggaaagctgtgcagcctgtaacccccccaggagaagctgggaaaccaagctcatagtcaggccgataacgccatggcacggaaaaagccatgctgcctgtgagcccctcagaggacactgagtcaaaaaaccccacgcgcttggaagcgcaggatgggaaaagaaggtggcgaccttccccaccctttaatctggggcctgaactggagattagctgtgaatctccagcagaaggactagtggttagaggagaccccccggaaaacgcaaaacagcatattgacgctgggaaagaccagagactccatgagtttccaccacgctggccgccaggcacagatcgccgaacagcggcggccggtgtggggaaatcca

SEQ ID NO: 276 - RNA, 374 nt, Zika virus
  source 1..374: mol_type = genomic RNA
gcaccaattttagtgttgtcaggcctgctagtcagccacagcttggggaaagctgtgcagcctgtgacccccccaggagaagctgggaaaccaagcccatagtcaggccgagaacgccatggcacggaagaagccatgctgcctgtgagcccctcagaggacactgagtcaaaaaaccccacgcgcttggaggcgcaggatgggaaaagaaggtggcgaccttccccaccctccaatctggggcctgaactggagatcagctgtggatctccaggagagggactagcggttagaggagaccccccggaaaacgcaaaacagcatattgacgctgggaaagaccagagactccatgagtttccaccacgctggcc

SEQ ID NO: 277 - RNA, 318 nt, Zika virus
  source 1..318: mol_type = genomic RNA
gcaccaatcttaatgttgtcaggcctgctagtcagccacagcttggggaaagctgtgcagcctgtgacccccccaggagaagctgggaaaccaagcctatagtcaggccgagaacgccatggcacggaagaagccatgctgcctgtgagcccctcagaggacactgagtcaaaaaaccccacgcgcttggaggcgcaggatgggaaaagaaggtggcgaccttccccacccttcaatctggggcctgaactggagatcagctgtggatctccagaagagggactagtggttagaggagaccccccggaaaacgcaaaa

SEQ ID NO: 278 - RNA, 318 nt, Zika virus
  source 1..318: mol_type = genomic RNA
gcaccaattttagtgttgtcaggcctgctagtcagccacagtttggggaaagctgtgcagcctgtaacccccccaggagaagctgggaaaccaagctcatagtcaggccgagaacgccatggcacggaagaagccatgctgcctgtgagcccctcagaggacactgagtcaaaaaaccccacgcgcttggaagcgcaggatgggaaaagaaggtggcgaccttccccacccttcaatctggggcctgaactggagactagctgtgaatctccagcagagggactagtggttagaggagaccccccggaaaacgcaaaa

SEQ ID NO: 279 - RNA, 407 nt, Zika virus
  source 1..407: mol_type = genomic RNA
gcaccaatcttagtgttgtcaggcctgctagtcagccacagcttggggaaagctgtgcagcctgtgacccccccaggagaagctgggaaaccaagcctatagtcaggccgagaacgccatggcacggaagaagccatgctgcctgtgagcccctcagaggacactgagtcaaaaaaccccacgcgcttggaggcgcaggatgggaaaagaaggtggcgaccttccccacccttcaatctggggcctgaactggagatcagctgtggatctccagaagagggactagtggttagaggagaccccccggaaaacgcaaaacagcatattgacgctgggaaagaccagagactccatgagtttccaccacgctggccgccaggcacagatcgccgaatagcggcggccgg

SEQ ID NO: 280 - RNA, 428 nt, Zika virus; identical to SEQ ID NO: 20
  source 1..428: mol_type = genomic RNA

SEQ ID NO: 281 - RNA, 428 nt, Zika virus; identical to SEQ ID NO: 20
  source 1..428: mol_type = genomic RNA

SEQ ID NO: 282 - RNA, 429 nt, Zika virus
  source 1..429: mol_type = genomic RNA
gcaccaattttagtgttgtcaggcctgctagtcagccacagtttggggaaagctgtgcagcctgtaacccccccaggagaagctgggaaaccaagctcatagtcaggccgagaacgccatggcacggaagaagccatgctgcctgtgagcccctcagaggacactgagtcaaaaaaccccacgcgcttggaagcgcaggatgggaaaagaaggtggcgaccttccccacccttcaatctggggcctgaactggagactagctgtgaatctccagcagagggactagtggttagaggagaccccccggaaaacgcaaaacagcatattgacgctgggaaagaccagagactccatgagtttccaccacgctggccgccaggcacagatcgccgaacagcggcggccggtgtggggaaatccatggtttct

SEQ ID NO: 283 - RNA, 428 nt, Zika virus; identical to SEQ ID NO: 271
  source 1..428: mol_type = genomic RNA

SEQ ID NO: 284 - RNA, 428 nt, Zika virus; identical to SEQ ID NO: 20
  source 1..428: mol_type = genomic RNA

SEQ ID NO: 285 - RNA, 428 nt, Zika virus; identical to SEQ ID NO: 20
  source 1..428: mol_type = genomic RNA

SEQ ID NO: 286 - RNA, 428 nt, Zika virus; identical to SEQ ID NO: 272
  source 1..428: mol_type = genomic RNA

SEQ ID NO: 287 - RNA, 428 nt, Zika virus; identical to SEQ ID NO: 214
  source 1..428: mol_type = genomic RNA

SEQ ID NO: 288 - RNA, 429 nt, Zika virus; identical to SEQ ID NO: 16
  source 1..429: mol_type = genomic RNA

SEQ ID NO: 289 - RNA, 428 nt, Zika virus; identical to SEQ ID NO: 20
  source 1..428: mol_type = genomic RNA

SEQ ID NO: 290 - RNA, 426 nt, Zika virus
  source 1..426: mol_type = genomic RNA
gcatcaatttcaatgttgtcaggcctgctagtcagccacagtttggggaaagctgtgcagcctgtaacccccccaggagaagctgggaaaccaagctcatagtcaggccgataacgccatggcacggaaaaagccatgctgcctgtgagcccctcagaggacactgagtcaaaaaaccccacgcgcttggaagcgcaggatgggaaaagaaggtggcgaccttccccaccctttaatctggggcctgaactggagattagctgtgaatctccagcagaaggactagtggttagaggagaccccccggaaaacgcaaaacagcatattgacgctgggaaagaccagagactccatgagtttccaccacgctggccgccaggcacagatcgccgaacagcggcggccggtgtggggaaatccatgggt

SEQ ID NO: 291 - RNA, 428 nt, Zika virus
  source 1..428: mol_type = genomic RNA
gcaccaatcttaatgttgtcaggcctgctagtcagccacagcttggggaaagctgtgcagcctgtgacccccccaggagaagctgggaaaccaagcctatagtcaggccgagagcgccatggcacggaagaagccatgctgcctgtgagcccctcagaggacactgagtcaaaaaaccccacgcgcttggaggcgcaggatgggaaaagaaggtggcgaccttccccacccttcaatctggggcctgaactggagatcagctgtggatctccagaagagggactagtggttagaggagaccccccggaaaacgcaaaacagcatattgacgctgggaaagaccagagactccatgagtttccaccacgctggccgccaggcacagatcgccgaatagcggcggccggtgtggggaaatccatgggtct

SEQ ID NO: 292 - RNA, 428 nt, Zika virus; identical to SEQ ID NO: 20
  source 1..428: mol_type = genomic RNA

SEQ ID NO: 293 - RNA, 427 nt, Zika virus
  source 1..427: mol_type = genomic RNA
gcaccaatcttaatgttgtcaggcctgctagtcagccacagcttggggaaagctgtgcagcctgtgacccccccaggagaagctgggaaaccaagcctatagtcaggccgagaacgccatggcacggaagaagccatgctgcctgtgagcccctcagaggacactgagtcaaaaaaccccacgcgcttggaggcgcaggatgggaaaagaaggtggcgaccttccccacccttcaatctggggcctgaactggagatcagctgtggatctccagaagagggactagtggttagaggagaccccccggaaaacgcaaaacagcatattgacgctgggaaagaccagagactccatgagtttccaccacgctggccgccaggcacagatcgccgaatagcggcggccggtgtggggaaatccatgggtc

SEQ ID NO: 294 - RNA, 428 nt, Zika virus; identical to SEQ ID NO: 20
  source 1..428: mol_type = genomic RNA

SEQ ID NO: 295 - RNA, 429 nt, Zika virus
  source 1..429: mol_type = genomic RNA
gcaccaatcttagtgttgtcaggcctgctagtcagccacagcttggggaaagctgtgcagcctgtgacccccccaggagaagctgggaaaccaagcctatagtcaggccgagaacgccatggcacggaagaagccatgctgcctgtgagcccctcagaggacactgagtcaaaaaaccccacgcgcttggaggcgcaggatgggaaaagaaggtggcgaccttccccacccttcaatctggggcctgaactggagatcagctgtggatctccagaagagggactagtggttagaggagaccccccggaaaacgcaaaacagcatattgacgctgggaaagaccagagactccatgagtttccaccacgctggccgccaggcacagatcgccgaatagcggcggccggtgtggggaaatccatgggtctt

SEQ ID NO: 296 - RNA, 427 nt, Zika virus; identical to SEQ ID NO: 293
  source 1..427: mol_type = genomic RNA

SEQ ID NO: 297 - RNA, 428 nt, Zika virus; identical to SEQ ID NO: 20
  source 1..428: mol_type = genomic RNA

SEQ ID NO: 298 - RNA, 428 nt, Zika virus
  source 1..428: mol_type = genomic RNA
gcaccaatcttaatgttgtcaggcctgctagtcagccacagcttggggaaagctgtgcagcctgtgacccccccaggagaagctgggaaaccaagcctatagtcaggccgagaacgccatggcacggaagaagccatgctgcctgtgagcccctcagaggacactgagtcaaaaaaccccatgcgcttggaggcgcaggatgggaaaagaaggtggcgaccttccccacccttcaatctggggcctgaactggagatcagctgtggatctccagaagagggactagtggttagaggagccccccggaaaacgcaaaacagcatattgacgctgggaaagaccagagactccatgagtttccaccacgctggccgccaggcacagatcgccgaatagcggcggccggtgtggggaaatccatgggtctt

SEQ ID NO: 299 - RNA, 428 nt, Zika virus; identical to SEQ ID NO: 42
  source 1..428: mol_type = genomic RNA

SEQ ID NO: 300 - RNA, 428 nt, Zika virus
  source 1..428: mol_type = genomic RNA
gcatcaatttcaatgttgtcaggcctgctagtcagccacagtttggggaaagctgtgcagcctgtaacccccccaggagaagctgggaaaccaagctcatagtcaggccgataacgccatggcacggaaaaagccatgctgcctgtgagcccctcagaggacactgagtcaaaaaaccccacgcgcttggaagcgcaggatgggaaaagaaggtggcgaccttccccaccctttaatctggggcctgaactggagattagctgtgaatctccagcagaaggactagtggttagaggagaccccccggaaaacgcaaaacagcatattgacgctgggaaagaccagagactccatgagtttccaccacgctggccgccaggcacagatcgccgaacagcggcggccggtgtggggaaatccatgggtct

SEQ ID NO: 301 - RNA, 428 nt, Zika virus; identical to SEQ ID NO: 126
  source 1..428: mol_type = genomic RNA

SEQ ID NO: 302 - RNA, 429 nt, Zika virus; identical to SEQ ID NO: 282
  source 1..429: mol_type = genomic RNA

SEQ ID NO: 303 - RNA, 428 nt, Zika virus; identical to SEQ ID NO: 300
  source 1..428: mol_type = genomic RNA

SEQ ID NO: 304 - RNA, 427 nt, Zika virus
  source 1..427: mol_type = genomic RNA
gcaccaatcttaatgttgtcaggcctgctagtcagccacagcttggggaaagctgtgcagcctgtgacccccccaggagaagctgggaaaccaagcctatagtcaggccgagaacgccatggcacggaagaagccatgctgcctgtgagcccctcagaggacactgagtcaaaaaaccccacgcgcttggaggcgcaggatgggaaaagaaggtggcgaccttccccacccttcaatctggggcctgaactggagatcagctgtggatctccagaagagggactagtggttagaggagaccccccggaaaacgcaaaacagcatattgacgctgggaaagaccagagactccatgagtttccaccacgctggccgccaggcacagatcgccgaatagcggcggccggtgtggggaaatccatgcagc

SEQ ID NO: 305 - RNA, 428 nt, Zika virus; identical to SEQ ID NO: 20
  source 1..428: mol_type = genomic RNA

SEQ ID NO: 306 - RNA, 428 nt, Zika virus; identical to SEQ ID NO: 20
  source 1..428: mol_type = genomic RNA

SEQ ID NO: 307 - RNA, 298 nt, Zika virus; identical to SEQ ID NO: 240
  source 1..298: mol_type = genomic RNA

SEQ ID NO: 308 - RNA, 298 nt, Zika virus; identical to SEQ ID NO: 240
  source 1..298: mol_type = genomic RNA

SEQ ID NO: 309 - RNA, 257 nt, Zika virus
  source 1..257: mol_type = genomic RNA
gcaccaatcttaatgttgtcaggcctgctagtcagccacagcttggggaaagctgtgcagcctgtgacccccccaggagaagctgggaaaccaagcctatagtcaggccgagaacgccatggcacggaagaagccatgctgcctgtgagcccctcagaggacactgagtcaaaaaaccccacgcgcttggaggcgcaggatgggaaaagaaggtggcgaccttccccacccttcaatctggggcctgaactggagat

SEQ ID NO: 310 - RNA, 257 nt, Zika virus; identical to SEQ ID NO: 309
  source 1..257: mol_type = genomic RNA

SEQ ID NO: 311 - RNA, 429 nt, Zika virus; identical to SEQ ID NO: 295
  source 1..429: mol_type = genomic RNA

SEQ ID NO: 312 - RNA, 299 nt, Zika virus; identical to SEQ ID NO: 45
  source 1..299: mol_type = genomic RNA

SEQ ID NO: 313 - RNA, 421 nt, Zika virus
  source 1..421: mol_type = genomic RNA
gcaccaatcttaatgttgtcaggcctgctagtcagccacagcttggggaaagctgtgcagcctgtgacccctccaggagaagctgggtaaccaagcctatagtcaggccgagaacgccatggcacggaagaagccatgctgcctgtgagcccctcagaggacactgagtcaaaaaaccccacgcgcttggaggcgcaggatgggaaaagaaggtggcgaccttccccacccttcaatctggggcctgaactggagatcagctgtggatctccagaagagggactagtggttagaggagaccccccggaaaacgcaaaacagcatattgacgctgggaaagaccagagactccatgagtttccaccacgctggccgccaggcacagatcgccgaatagcggcggccggtgtggggaaatcca

SEQ ID NO: 314 - RNA, 298 nt, Zika virus
  source 1..298: mol_type = genomic RNA
gcaccagtcttaatgttgtcaggcctgctagtcagccacagcttggggaaagctgtgcagcctgtgacccccccaggagaagctgggaaaccaagcctatagtcaggccgagaacgccatggcacggaagaagccatgctgcctgtgagcccctcagaggacactgagtcaaaaaaccccacgcgcttggaggcgcaggatgggaaaagaaggtggcgaccttccccacccttcaatctggggcctgaactggagatcagctgtggatctccagaagagggactagtggttagaggag

SEQ ID NO: 315 - RNA, 429 nt, Zika virus; identical to SEQ ID NO: 2
  source 1..429: mol_type = genomic RNA

SEQ ID NO: 316 - RNA, 428 nt, Zika virus
  source 1..428: mol_type = genomic RNA
gcaccaatcttagtgttgtcaggcctgctagtcagccacagcttggggaaagctgtgcagcctgtgacccccccaggagaggctgggaaaccaagcccatagtcaggccgagaacgccatggcacggaagaagccatgctgcctgtgagcccctcagaggacactgagtcaaaaaaccccacgcgcttggaggcgcaggatgggaaaagaaggtggcgaccttccccacccttcaatctggggcctgaactggagatcagctgtggatctccagaagagggactagtggttagaggagaccccccggaaaacgcaaaacagcatattgacgctgggaaagaccagagactccatgagtttccaccacgctggccgccaggcacagatcgccgaatagcggcggccggtgtggggaaatccatgggtct

SEQ ID NO: 317 - RNA, 428 nt, Zika virus; identical to SEQ ID NO: 213
  source 1..428: mol_type = genomic RNA

SEQ ID NO: 318 - RNA, 429 nt, Zika virus; identical to SEQ ID NO: 16
  source 1..429: mol_type = genomic RNA

SEQ ID NO: 319 - RNA, 297 nt, Zika virus; identical to SEQ ID NO: 79
  source 1..297: mol_type = genomic RNA

SEQ ID NO: 320 - RNA, 299 nt, Zika virus; identical to SEQ ID NO: 45
  source 1..299: mol_type = genomic RNA

SEQ ID NO: 321 - RNA, 429 nt, Zika virus; identical to SEQ ID NO: 282
  source 1..429: mol_type = genomic RNA

SEQ ID NO: 322 - RNA, 428 nt, Zika virus; identical to SEQ ID NO: 213
  source 1..428: mol_type = genomic RNA

SEQ ID NO: 323 - RNA, 428 nt, Zika virus; identical to SEQ ID NO: 15
  source 1..428: mol_type = genomic RNA

SEQ ID NO: 324 - RNA, 107 nt, Zika virus; identical to SEQ ID NO: 1
  source 1..107: mol_type = genomic RNA

SEQ ID NO: 325 - RNA, 106 nt, Zika virus
  source 1..106: mol_type = genomic RNA
agttgttgatctgtgtgagtcagactgcgacagttcgagtctgaagcgagagctaacaacagtatcaacaggtttaatttggatttggaaacgagagtttctggtc

SEQ ID NO: 326 - RNA, 107 nt, Zika virus; identical to SEQ ID NO: 1
  source 1..107: mol_type = genomic RNA

SEQ ID NO: 327 - RNA, 107 nt, Zika virus; identical to SEQ ID NO: 1
  source 1..107: mol_type = genomic RNA

SEQ ID NO: 328 - RNA, 107 nt, Zika virus; identical to SEQ ID NO: 1
  source 1..107: mol_type = genomic RNA

SEQ ID NO: 329 - RNA, 103 nt, Zika virus
  source 1..103: mol_type = genomic RNA
tgttgatctgtgtgaatcagactgcgacagttcgagtttgaagcgagagctaacaacagtatcaacaggtttaatttggatttggaaacgagagtttctggtc

SEQ ID NO: 330 - RNA, 107 nt, Zika virus
  source 1..107: mol_type = genomic RNA
ggttgttgatctgtgtgaatcagactgcgacagttcgagtttgaagcgaaagctagcaacagtatcaacaggttttattttggatttggaaacgagagtttctggtc

SEQ ID NO: 331 - RNA, 93 nt, Zika virus
  source 1..93: mol_type = genomic RNA
tgtgaatcagactgcgacagttcgagtttgaagcgaaagctaacaacagtgtcaacaggtttattttggatttggaaacgagagtttctggtc

SEQ ID NO: 332 - RNA, 95 nt, Zika virus
  source 1..95: mol_type = genomic RNA
ggtttattttggtttggaaacgagagtttctggtcatgaaaaacccaaaaaagaaatccggtttattttggatttggaaacgagagtttctggtc

SEQ ID NO: 333 - RNA, 46 nt, Zika virus
  source 1..46: mol_type = genomic RNA
gtatcaacaggttttattttggatttggaaacgagagtttctggtc

SEQ ID NO: 334 - RNA, 46 nt, Zika virus; identical to SEQ ID NO: 333
  source 1..46: mol_type = genomic RNA

SEQ ID NO: 335 - RNA, 94 nt, Zika virus
  source 1..94: mol_type = genomic RNA
tgtgaatcagactgcgacagttcgagtttgaagcgaaagctagcaacagtatcaacaggttttattttggatttggaaacgagagtttctggtc

SEQ ID NO: 336 - RNA, 44 nt, Zika virus
  source 1..44: mol_type = genomic RNA
atcaacaggttttattttggatttggaaacgagagtttctggtc

SEQ ID NO: 337 - RNA, 45 nt, Zika virus
  source 1..45: mol_type = genomic RNA
tatcaacaggttttattttggatttggaaacgagagtttctggtc

SEQ ID NO: 338 - RNA, 45 nt, Zika virus; identical to SEQ ID NO: 337
  source 1..45: mol_type = genomic RNA

SEQ ID NO: 339 - RNA, 34 nt, Zika virus
  source 1..34: mol_type = genomic RNA
tttattttggatttggaaacgagagtttctggtc

SEQ ID NO: 340 - RNA, 46 nt, Zika virus; identical to SEQ ID NO: 333
  source 1..46: mol_type = genomic RNA

SEQ ID NO: 341 - RNA, 46 nt, Zika virus; identical to SEQ ID NO: 333
  source 1..46: mol_type = genomic RNA

SEQ ID NO: 342 - RNA, 35 nt, Zika virus
  source 1..35: mol_type = genomic RNA
ttttattttggatttggaagcgagagtttctggtc

SEQ ID NO: 343 - RNA, 91 nt, Zika virus
  source 1..91: mol_type = genomic RNA
gaatcagactgcgacagttcgagtttgaagcgaaagctagcaacagtatcaacaggttttattttggatttggaaacgagagtttctggtc

SEQ ID NO: 344 - RNA, 46 nt, Zika virus; identical to SEQ ID NO: 333
  source 1..46: mol_type = genomic RNA

SEQ ID NO: 345 - RNA, 31 nt, Zika virus
  source 1..31: mol_type = genomic RNA
attttggatttggaaacgagagtttctggtc

SEQ ID NO: 346 - RNA, 71 nt, Zika virus
  source 1..71: mol_type = genomic RNA
gagtttgaagcgaaagctagcaacagtatcaacaggttttattttggatttggaaacgagagtttctggtc

SEQ ID NO: 347 - RNA, 98 nt, Zika virus
  source 1..98: mol_type = genomic RNA
atctgtgtgaatcagactgcgacagttcgagtttgaagcgagagctaacaacagtatcaacaggtttaatttggatttggaaacgagagtttctggtc

SEQ ID NO: 348 - RNA, 98 nt, Zika virus
  source 1..98: mol_type = genomic RNA
atctgtgtgagtcagactgcgacagttcgagtctgaagcgagagctaacaacagtatcaacaggtttaatttggatttggaaacgagagtttctggtc

SEQ ID NO: 349 - RNA, 98 nt, Zika virus; identical to SEQ ID NO: 348
  source 1..98: mol_type = genomic RNA

SEQ ID NO: 350 - RNA, 107 nt, Zika virus; identical to SEQ ID NO: 1
  source 1..107: mol_type = genomic RNA

SEQ ID NO: 351 - RNA, 97 nt, Zika virus
  source 1..97: mol_type = genomic RNA
gattgtgaatcagactgcgacagttcgagtttgaagcgaaagctagcaacagtatcaacaggttttattttggatttggaaacgagagtttctggtc

SEQ ID NO: 352 - RNA, 106 nt, Zika virus
  source 1..106: mol_type = genomic RNA
agttgttgatctgtgtgaatcagactgcgacagttcgagtttgaagcgagagctaacaacagtatcaacaggtttaatttggatttggaaacgagagtttctggtc

SEQ ID NO: 353 - RNA, 106 nt, Zika virus; identical to SEQ ID NO: 352
  source 1..106: mol_type = genomic RNA

SEQ ID NO: 354 - RNA, 107 nt, Zika virus; identical to SEQ ID NO: 1
  source 1..107: mol_type = genomic RNA

SEQ ID NO: 355 - RNA, 105 nt, Zika virus
  source 1..105: mol_type = genomic RNA
gttgttactgttgctgactcagactgcgacagttcgagtttgaagcgaaagctagcaacagtatcaacaggttttatttggatttggaaacgagagtttctggtc

SEQ ID NO: 356 - RNA, 107 nt, Zika virus; identical to SEQ ID NO: 1
  source 1..107: mol_type = genomic RNA

SEQ ID NO: 357 - RNA, 107 nt, Zika virus; identical to SEQ ID NO: 1
  source 1..107: mol_type = genomic RNA

SEQ ID NO: 358 - RNA, 107 nt, Zika virus; identical to SEQ ID NO: 1
  source 1..107: mol_type = genomic RNA

SEQ ID NO: 359 - RNA, 107 nt, Zika virus; identical to SEQ ID NO: 1
  source 1..107: mol_type = genomic RNA

SEQ ID NO: 360 - RNA, 107 nt, Zika virus; identical to SEQ ID NO: 1
  source 1..107: mol_type = genomic RNA

SEQ ID NO: 361 - RNA, 79 nt, Zika virus
  source 1..79: mol_type = genomic RNA
gacagttcgagtttgaagcgaaagctagcaacagtatcaacaggttttattttggatttggaaacgagagtttctggtc

SEQ ID NO: 362 - RNA, 79 nt, Zika virus; identical to SEQ ID NO: 361
  source 1..79: mol_type = genomic RNA

SEQ ID NO: 363 - RNA, 79 nt, Zika virus; identical to SEQ ID NO: 361
  source 1..79: mol_type = genomic RNA

SEQ ID NO: 364 - RNA, 107 nt, Zika virus; identical to SEQ ID NO: 1
  source 1..107: mol_type = genomic RNA

SEQ ID NO: 365 - RNA, 107 nt, Zika virus; identical to SEQ ID NO: 1
  source 1..107: mol_type = genomic RNA

SEQ ID NO: 366 - RNA, 107 nt, Zika virus; identical to SEQ ID NO: 1
  source 1..107: mol_type = genomic RNA

SEQ ID NO: 367 - RNA, 107 nt, Zika virus; identical to SEQ ID NO: 1
  source 1..107: mol_type = genomic RNA

SEQ ID NO: 368 - RNA, 107 nt, Zika virus; identical to SEQ ID NO: 1
  source 1..107: mol_type = genomic RNA

SEQ ID NO: 369 - RNA, 107 nt, Zika virus; identical to SEQ ID NO: 1
  source 1..107: mol_type = genomic RNA

SEQ ID NO: 370 - RNA, 107 nt, Zika virus; identical to SEQ ID NO: 1
  source 1..107: mol_type = genomic RNA

SEQ ID NO: 371 - RNA, 107 nt, Zika virus; identical to SEQ ID NO: 1
  source 1..107: mol_type = genomic RNA

SEQ ID NO: 372 - RNA, 107 nt, Zika virus; identical to SEQ ID NO: 1
  source 1..107: mol_type = genomic RNA

SEQ ID NO: 373 - RNA, 95 nt, Zika virus
  source 1..95: mol_type = genomic RNA
gtgtgaatcagactgcgacagttcgagtttgaagcgaaagctagcaacagtatcaacaggttttattttggatttggaaacgagagtttctggtc

SEQ ID NO: 374 - RNA, 94 nt, Zika virus; identical to SEQ ID NO: 335
  source 1..94: mol_type = genomic RNA

SEQ ID NO: 375 - RNA, 94 nt, Zika virus; identical to SEQ ID NO: 335
  source 1..94: mol_type = genomic RNA

SEQ ID NO: 376 - RNA, 107 nt, Zika virus; identical to SEQ ID NO: 1
  source 1..107: mol_type = genomic RNA

SEQ ID NO: 377 - RNA, 107 nt, Zika virus; identical to SEQ ID NO: 1
  source 1..107: mol_type = genomic RNA

SEQ ID NO: 378 - RNA, 107 nt, Zika virus; identical to SEQ ID NO: 1
  source 1..107: mol_type = genomic RNA

SEQ ID NO: 379 - RNA, 107 nt, Zika virus; identical to SEQ ID NO: 1
  source 1..107: mol_type = genomic RNA

SEQ ID NO: 380 - RNA, 107 nt, Zika virus; identical to SEQ ID NO: 1
  source 1..107: mol_type = genomic RNA

SEQ ID NO: 381 - RNA, 107 nt, Zika virus; identical to SEQ ID NO: 1
  source 1..107: mol_type = genomic RNA

SEQ ID NO: 382 - RNA, 107 nt, Zika virus; identical to SEQ ID NO: 1
  source 1..107: mol_type = genomic RNA

SEQ ID NO: 383 - RNA, 107 nt, Zika virus; identical to SEQ ID NO: 1
  source 1..107: mol_type = genomic RNA

SEQ ID NO: 384 - RNA, 107 nt, Zika virus; identical to SEQ ID NO: 1
  source 1..107: mol_type = genomic RNA

SEQ ID NO: 385 - RNA, 107 nt, Zika virus; identical to SEQ ID NO: 1
  source 1..107: mol_type = genomic RNA

SEQ ID NO: 386 - RNA, 107 nt, Zika virus; identical to SEQ ID NO: 1
  source 1..107: mol_type = genomic RNA

SEQ ID NO: 387 - RNA, 107 nt, Zika virus; identical to SEQ ID NO: 1
  source 1..107: mol_type = genomic RNA

SEQ ID NO: 388 - RNA, 92 nt, Zika virus
  source 1..92: mol_type = genomic RNA
gtgaatcagactgcgacagttcgagtttgaagcgagagctaacaacagtatcaacaggtttaatttggatttggaaacgagagtttctggtc

SEQ ID NO: 389 - RNA, 106 nt, Zika virus
  source 1..106: mol_type = genomic RNA
gttgttgatctgtgtgaatcagactgcgacagttcgagtttgaagcgaaagctagcaacagtatcaacaggttttattttggatttggaaacgagagtttctggtc

SEQ ID NO: 390 - RNA, 99 nt, Zika virus
  source 1..99: mol_type = genomic RNA
atctgtgtgaatcagactgcgacagttcgagtttgaagcgaaagctagcaacagtatcaacaggttttattttggatttggaaacgagagtttctggtc

SEQ ID NO: 391 - RNA, 95 nt, Zika virus; identical to SEQ ID NO: 373
  source 1..95: mol_type = genomic RNA

SEQ ID NO: 392 - RNA, 94 nt, Zika virus; identical to SEQ ID NO: 335
  source 1..94: mol_type = genomic RNA

SEQ ID NO: 393 - RNA, 94 nt, Zika virus; identical to SEQ ID NO: 335
  source 1..94: mol_type = genomic RNA

SEQ ID NO: 394 - RNA, 94 nt, Zika virus; identical to SEQ ID NO: 335
  source 1..94: mol_type = genomic RNA

SEQ ID NO: 395 - RNA, 95 nt, Zika virus; identical to SEQ ID NO: 373
  source 1..95: mol_type = genomic RNA

SEQ ID NO: 396 - RNA, 94 nt, Zika virus; identical to SEQ ID NO: 335
  source 1..94: mol_type = genomic RNA

SEQ ID NO: 397 - RNA, 95 nt, Zika virus; identical to SEQ ID NO: 373
  source 1..95: mol_type = genomic RNA

SEQ ID NO: 398 - RNA, 94 nt, Zika virus; identical to SEQ ID NO: 335
  source 1..94: mol_type = genomic RNA

SEQ ID NO: 399 - RNA, 94 nt, Zika virus; identical to SEQ ID NO: 335
  source 1..94: mol_type = genomic RNA

SEQ ID NO: 400 - RNA, 94 nt, Zika virus; identical to SEQ ID NO: 335
  source 1..94: mol_type = genomic RNA

SEQ ID NO: 401 - RNA, 95 nt, Zika virus; identical to SEQ ID NO: 373
  source 1..95: mol_type = genomic RNA

SEQ ID NO: 402 - RNA, 94 nt, Zika virus; identical to SEQ ID NO: 335
  source 1..94: mol_type = genomic RNA

SEQ ID NO: 403 - RNA, 94 nt, Zika virus; identical to SEQ ID NO: 335
  source 1..94: mol_type = genomic RNA

SEQ ID NO: 404 - RNA, 95 nt, Zika virus; identical to SEQ ID NO: 373
  source 1..95: mol_type = genomic RNA

SEQ ID NO: 405 - RNA, 94 nt, Zika virus; identical to SEQ ID NO: 335
  source 1..94: mol_type = genomic RNA

SEQ ID NO: 406 - RNA, 103 nt, Zika virus
  source 1..103: mol_type = genomic RNA
gttgatctgtgtgaatcagactgcgacagttcgagtttgaagcgaaagctagcaacagtatcaacaggttttattttggatttggaaacgagagtttctggtc

SEQ ID NO: 407 - RNA, 97 nt, Zika virus
  source 1..97: mol_type = genomic RNA
ctgtgtgaatcagactgcgacagttcgagtttgaagcgaaagctagcaacagtatcaacaggttttattttggatttggaaacgagagtttctggtc

SEQ ID NO: 408 - RNA, 102 nt, Zika virus
  source 1..102: mol_type = genomic RNA
ttgatctgtgtgaatcagactgcgacagttcgagtttgaagcgaaagctagcaacagtatcaacaggttttattttggatttggaaacgagagtttctggtc

SEQ ID NO: 409 - RNA, 102 nt, Zika virus; identical to SEQ ID NO: 408
  source 1..102: mol_type = genomic RNA

SEQ ID NO: 410 - RNA, 94 nt, Zika virus; identical to SEQ ID NO: 335
  source 1..94: mol_type = genomic RNA

SEQ ID NO: 411 - RNA, 94 nt, Zika virus; identical to SEQ ID NO: 335
  source 1..94: mol_type = genomic RNA

SEQ ID NO: 412 - RNA, 98 nt, Zika virus; identical to SEQ ID NO: 348
  source 1..98: mol_type = genomic RNA

SEQ ID NO: 413 - RNA, 107 nt, Zika virus; identical to SEQ ID NO: 1
  source 1..107: mol_type = genomic RNA

SEQ ID NO: 414 - RNA, 107 nt, Zika virus; identical to SEQ ID NO: 1
  source 1..107: mol_type = genomic RNA

SEQ ID NO: 415 - RNA, 94 nt, Zika virus; identical to SEQ ID NO: 335
  source 1..94: mol_type = genomic RNA

SEQ ID NO: 416 - RNA, 94 nt, Zika virus; identical to SEQ ID NO: 335
  source 1..94: mol_type = genomic RNA

SEQ ID NO: 417 - RNA, 87 nt, Zika virus
  source 1..87: mol_type = genomic RNA
cagactgcgacagttcgagtttgaagcgaaagctagcaacagtatcaacaggttttattttggatttggaaacgagagtttctggtc

SEQ ID NO: 418 - RNA, 73 nt, Zika virus
  source 1..73: mol_type = genomic RNA
tcgagtttgaagcgaaagctagcaacagtatcaacaggttttattttggatttggaaacgagagtttctggtc

SEQ ID NO: 419 - RNA, 87 nt, Zika virus; identical to SEQ ID NO: 417
  source 1..87: mol_type = genomic RNA

SEQ ID NO: 420 - RNA, 103 nt, Zika virus; identical to SEQ ID NO: 329
  source 1..103: mol_type = genomic RNA

SEQ ID NO: 421 - RNA, 82 nt, Zika virus
  source 1..82: mol_type = genomic RNA
tgcgacagttcgagtttgaagcgaaagctagcaacagtatcaacaggttttattttggatttggaaacgagagtttctggtc

SEQ ID NO: 422 - RNA, 82 nt, Zika virus; identical to SEQ ID NO: 421
  source 1..82: mol_type = genomic RNA

SEQ ID NO: 423 - RNA, 82 nt, Zika virus
  source 1..82: mol_type = genomic RNA
tgcgacagttcgagtttgaagcgaaagctagctacagtatcaacaggttttattttggatttggaaacgagagtttctggtc

SEQ ID NO: 424 - RNA, 107 nt, Zika virus; identical to SEQ ID NO: 1
  source 1..107: mol_type = genomic RNA

SEQ ID NO: 425 - RNA, 107 nt, Zika virus; identical to SEQ ID NO: 1
  source 1..107: mol_type = genomic RNA

SEQ ID NO: 426 - RNA, 107 nt, Zika virus; identical to SEQ ID NO: 1
  source 1..107: mol_type = genomic RNA

SEQ ID NO: 427 - RNA, 107 nt, Zika virus; identical to SEQ ID NO: 1
  source 1..107: mol_type = genomic RNA

SEQ ID NO: 428 - RNA, 107 nt, Zika virus; identical to SEQ ID NO: 1
  source 1..107: mol_type = genomic RNA

SEQ ID NO: 429 - RNA, 107 nt, Zika virus
  source 1..107: mol_type = genomic RNA
agttgttgatctgtgtgaatcagactgcgacagttcgagtttgaagcgaaagctagcaacagtatcaacaggtttaattttggatttggaaacgagagtttctggtc

SEQ ID NO: 430 - RNA, 91 nt, Zika virus; identical to SEQ ID NO: 343
  source 1..91: mol_type = genomic RNA

SEQ ID NO: 431 - RNA, 107 nt, Zika virus; identical to SEQ ID NO: 1
  source 1..107: mol_type = genomic RNA

SEQ ID NO: 432 - RNA, 107 nt, Zika virus; identical to SEQ ID NO: 1
  source 1..107: mol_type = genomic RNA

SEQ ID NO: 433 - RNA, 107 nt, Zika virus; identical to SEQ ID NO: 1
  source 1..107: mol_type = genomic RNA

SEQ ID NO: 434 - RNA, 106 nt, Zika virus; identical to SEQ ID NO: 352
  source 1..106: mol_type = genomic RNA

SEQ ID NO: 435 - RNA, 106 nt, Zika virus; identical to SEQ ID NO: 352
  source 1..106: mol_type = genomic RNA

SEQ ID NO: 436 - RNA, 107 nt, Zika virus; identical to SEQ ID NO: 1
  source 1..107: mol_type = genomic RNA

SEQ ID NO: 437 - RNA, 107 nt, Zika virus; identical to SEQ ID NO: 1
  source 1..107: mol_type = genomic RNA

SEQ ID NO: 438 - RNA, 70 nt, Zika virus
  source 1..70: mol_type = genomic RNA
gagtctgaagcgagagctaacaacagtatcaacaggtttaatttggatttggaaacgagagtttctggtc

SEQ ID NO: 439 - RNA, 69 nt, Zika virus
  source 1..69: mol_type = genomic RNA
agtctgaagcgagagctaacaacagtatcaacaggtttaatttggatttggaaacgagagtttctggtc

SEQ ID NO: 440 - RNA, 85 nt, Zika virus
  source 1..85: mol_type = genomic RNA
agactgcgacagttcgagtctgaagcgagagctaacaacagtatcaacaggtttaatttggatttggaaacgagagtttctggtc

SEQ ID NO: 441 - RNA, 69 nt, Zika virus; identical to SEQ ID NO: 439
  source 1..69: mol_type = genomic RNA

SEQ ID NO: 442 - RNA, 69 nt, Zika virus; identical to SEQ ID NO: 439
  source 1..69: mol_type = genomic RNA

SEQ ID NO: 443 - RNA, 69 nt, Zika virus; identical to SEQ ID NO: 439
  source 1..69: mol_type = genomic RNA

SEQ ID NO: 444 - RNA, 69 nt, Zika virus; identical to SEQ ID NO: 439
  source 1..69: mol_type = genomic RNA

SEQ ID NO: 445 - RNA, 69 nt, Zika virus; identical to SEQ ID NO: 439
  source 1..69: mol_type = genomic RNA

SEQ ID NO: 446 - RNA, 64 nt, Zika virus
  source 1..64: mol_type = genomic RNA
gaagcgagagctaacaacagtatcaacaggtttaatttggatttggaaacgagagtttctggtc

SEQ ID NO: 447 - RNA, 69 nt, Zika virus; identical to SEQ ID NO: 439
  source 1..69: mol_type = genomic RNA

SEQ ID NO: 448 - RNA, 68 nt, Zika virus
  source 1..68: mol_type = genomic RNA
gtctgaagcgagagctaacaacagtatcaacaggtttaatttggatttggaaacgagagtttctggtc

SEQ ID NO: 449 - RNA, 69 nt, Zika virus; identical to SEQ ID NO: 439
  source 1..69: mol_type = genomic RNA

SEQ ID NO: 450 - RNA, 77 nt, Zika virus
  source 1..77: mol_type = genomic RNA
actgtcgcagtctgaagcgagagctaacaacagtatcaacaggtttaatttggatttggaaacgagagtttctggtc

SEQ ID NO: 451 - RNA, 69 nt, Zika virus; identical to SEQ ID NO: 439
  source 1..69: mol_type = genomic RNA

SEQ ID NO: 452 - RNA, 77 nt, Zika virus; identical to SEQ ID NO: 450
  source 1..77: mol_type = genomic RNA

SEQ ID NO: 453 - RNA, 86 nt, Zika virus
  source 1..86: mol_type = genomic RNA
cagactgcgactgttcgagtctgaagcgagagctaacaacagtatcaacaggtttaatttggatttggaaacgagagtttctggtc

SEQ ID NO: 454 - RNA, 89 nt, Zika virus
  source 1..89: mol_type = genomic RNA
ctcagactgcgacagttcgagtttgaagcgaaagctagcaacagtatcaacaggttttattttggatttggaaacgagagtttctggtc

SEQ ID NO: 455 - RNA, 94 nt, Zika virus
  source 1..94: mol_type = genomic RNA
gctcactcagactgcgacagttcgagtttgaagcgaaagctagcaacagtatcaacaggttttattttggatttggaaacgagagtttctggtc

SEQ ID NO: 456 - RNA, 91 nt, Zika virus
  source 1..91: mol_type = genomic RNA
gactcagactgcgacagttcgagtttgaagcgagagctagcaacagtatcaacaggttttattttggatttggaaacgagagtttctggtc

SEQ ID NO: 457 - RNA, 98 nt, Zika virus
  source 1..98: mol_type = genomic RNA
tctgtgtgaatcagactgcgacagttcgagtttgaagcgaaagctagcaacagtatcaacaggttttattttggatttggaaacgagagtttctggtc

SEQ ID NO: 458 - RNA, 86 nt, Zika virus
  source 1..86: mol_type = genomic RNA
cagactgcgacagttcgagtctgaagcgagagctaacaacagtatcaacaggtttaatttggatttggaaacgagagtttctggtc

SEQ ID NO: 459 - RNA, 71 nt, Zika virus
  source 1..71: mol_type = genomic RNA
cgagtctgaagcgagagctaacaacagtatcaacaggtttaatttggatttggaaacgagagtttctggtc

SEQ ID NO: 460 - RNA, 79 nt, Zika virus
  source 1..79: mol_type = genomic RNA
cgacagttcgagtctgaagcgagagctaacaacagtatcaacaggtttaatttggatttggaaacgagagtttctggtc

SEQ ID NO: 461 - RNA, 86 nt, Zika virus; identical to SEQ ID NO: 458
  source 1..86: mol_type = genomic RNA

SEQ ID NO: 462 - RNA, 68 nt, Zika virus
  source 1..68: mol_type = genomic RNA
gtctgaagcgaatgctagcaacagtatcaacaggtttaatttggatttggaaacgagagtttctggtc

SEQ ID NO: 463 - RNA, 86 nt, Zika virus; identical to SEQ ID NO: 458
  source 1..86: mol_type = genomic RNA

SEQ ID NO: 464 - RNA, 66 nt, Zika virus
  source 1..66: mol_type = genomic RNA
ctgaagcgaaagctagcaacagtatcaacaggtttaatttggatttggaaacgagagtttctggtc

SEQ ID NO: 465 - RNA, 64 nt, Zika virus
  source 1..64: mol_type = genomic RNA
gaagcgaaagctaacaacagtatcaacaggtttaatttggatttggaaacgagagtttctggtc

SEQ ID NO: 466 - RNA, 66 nt, Zika virus
  source 1..66: mol_type = genomic RNA
ctgaagcgaaagctaacaacagtatcaacaggtttaatttggatttggaaacgagagtttctggtc

SEQ ID NO: 467 - RNA, 66 nt, Zika virus
  source 1..66: mol_type = genomic RNA
ctgaagcgagagctaacaacagtatcaacaggtttaatttggatttggaaacgagagtttctggtc

SEQ ID NO: 468 - RNA, 86 nt, Zika virus; identical to SEQ ID NO: 458
  source 1..86: mol_type = genomic RNA

SEQ ID NO: 469 - RNA, 87 nt, Zika virus
  source 1..87: mol_type = genomic RNA
tcagactgcgacagttcgagtctgaagcgagagctaacaacagtatcaacaggtttaatttggatttggaaacgagagtttctggtc

SEQ ID NO: 470 - RNA, 70 nt, Zika virus; identical to SEQ ID NO: 438
  source 1..70: mol_type = genomic RNA

SEQ ID NO: 471 - RNA, 87 nt, Zika virus; identical to SEQ ID NO: 469
  source 1..87: mol_type = genomic RNA

SEQ ID NO: 472 - RNA, 67 nt, Zika virus
  source 1..67: mol_type = genomic RNA
tctgaagcgagagctaacaacagtatcaacaggtttaatttggatttggaaacgagagtttctggtc

SEQ ID NO: 473 - RNA, 66 nt, Zika virus; identical to SEQ ID NO: 464
  source 1..66: mol_type = genomic RNA

SEQ ID NO: 474 - RNA, 69 nt, Zika virus
  source 1..69: mol_type = genomic RNA
agtctgaagcgaaagctagcaacagtatcaacaggtttaatttggatttggaaacgagagtttctggtc

SEQ ID NO: 475 - RNA, 67 nt, Zika virus
  source 1..67: mol_type = genomic RNA
tctgaagcgaaagctagcaacagtatcaacaggtttaatttggatttggaaacgagagtttctggtc

SEQ ID NO: 476 - RNA, 86 nt, Zika virus; identical to SEQ ID NO: 458
  source 1..86: mol_type = genomic RNA

SEQ ID NO: 477 - RNA, 82 nt, Zika virus
  source 1..82: mol_type = genomic RNA
ctgcgacagttcgagtctgaagcgaatgctaacaacagtatcaacaggtttaatttggatttggaaacgagagtttctggtc

SEQ ID NO: 478 - RNA, 66 nt, Zika virus; identical to SEQ ID NO: 467
  source 1..66: mol_type = genomic RNA

SEQ ID NO: 479 - RNA, 86 nt, Zika virus; identical to SEQ ID NO: 458
  source 1..86: mol_type = genomic RNA

SEQ ID NO: 480 - RNA, 87 nt, Zika virus; identical to SEQ ID NO: 469
  source 1..87: mol_type = genomic RNA

SEQ ID NO: 481 - RNA, 86 nt, Zika virus; identical to SEQ ID NO: 458
  source 1..86: mol_type = genomic RNA

SEQ ID NO: 482 - RNA, 79 nt, Zika virus; identical to SEQ ID NO: 460
  source 1..79: mol_type = genomic RNA

SEQ ID NO: 483 - RNA, 67 nt, Zika virus
  source 1..67: mol_type = genomic RNA
tctgaagcgaatgctagcaacagtatcaacaggtttaatttggatttggaaacgagagtttctggtc

SEQ ID NO: 484 - RNA, 87 nt, Zika virus
  source 1..87: mol_type = genomic RNA
tcagactgcgacagttcgagtctgaagcgaaagctaacaacagtatcaacaggtttaatttggatttggaaacgagagtttctggtc

SEQ ID NO: 485 - RNA, 87 nt, Zika virus
  source 1..87: mol_type = genomic RNA
tcagactgcgacagttcgagtctgaagcgaaagctaacaacagtatcaataggtttaatttggatttggaaacgagagtttctggtc

SEQ ID NO: 486 - RNA, 86 nt, Zika virus; identical to SEQ ID NO: 458
  source 1..86: mol_type = genomic RNA

SEQ ID NO: 487 - RNA, 72 nt, Zika virus
  source 1..72: mol_type = genomic RNA
tcgagtctgaagcgaatgctagcaacagtatcaacaggtttaatttggatttggaaacgagagtttctggtc

SEQ ID NO: 488 - RNA, 87 nt, Zika virus; identical to SEQ ID NO: 469
  source 1..87: mol_type = genomic RNA

SEQ ID NO: 489 - RNA, 68 nt, Zika virus; identical to SEQ ID NO: 448
  source 1..68: mol_type = genomic RNA

SEQ ID NO: 490 - RNA, 87 nt, Zika virus; identical to SEQ ID NO: 469
  source 1..87: mol_type = genomic RNA

SEQ ID NO: 491 - RNA, 69 nt, Zika virus; identical to SEQ ID NO: 439
  source 1..69: mol_type = genomic RNA

SEQ ID NO: 492 - RNA, 64 nt, Zika virus
  source 1..64: mol_type = genomic RNA
gaagcgagagctagcaacagtatcaacaggtttaatttggatttggaaacgagagtttctggtc

SEQ ID NO: 493 - RNA, 66 nt, Zika virus; identical to SEQ ID NO: 467
  source 1..66: mol_type = genomic RNA

SEQ ID NO: 494 - RNA, 86 nt, Zika virus; identical to SEQ ID NO: 458
  source 1..86: mol_type = genomic RNA

SEQ ID NO: 495 - RNA, 86 nt, Zika virus; identical to SEQ ID NO: 458
  source 1..86: mol_type = genomic RNA

SEQ ID NO: 496 - RNA, 86 nt, Zika virus; identical to SEQ ID NO: 458
  source 1..86: mol_type = genomic RNA

SEQ ID NO: 497 - RNA, 65 nt, Zika virus
  source 1..65: mol_type = genomic RNA
tgaagcgaatgctagcaacagtatcaacaggtttaatttggatttggaaacgagagtttctggtc

SEQ ID NO: 498 - RNA, 86 nt, Zika virus
  source 1..86: mol_type = genomic RNA
cagactgcgacagttcgagtctgaagcgaatgctaacaacagtatcaacaggtttaatttggatttggaaacgagagtttctggtc

SEQ ID NO: 499 - RNA, 87 nt, Zika virus; identical to SEQ ID NO: 469
  source 1..87: mol_type = genomic RNA

SEQ ID NO: 500 - RNA, 85 nt, Zika virus
  source 1..85: mol_type = genomic RNA
agactgcgacagttcgagtctgaagcgaatgctagcaacagtatcaacaggtttaatttggatttggaaacgagagtttctggtc

SEQ ID NO: 501 - RNA, 86 nt, Zika virus; identical to SEQ ID NO: 458
  source 1..86: mol_type = genomic RNA

SEQ ID NO: 502 - RNA, 69 nt, Zika virus; identical to SEQ ID NO: 439
  source 1..69: mol_type = genomic RNA

SEQ ID NO: 503 - RNA, 86 nt, Zika virus; identical to SEQ ID NO: 458
  source 1..86: mol_type = genomic RNA

SEQ ID NO: 504 - RNA, 84 nt, Zika virus
  source 1..84: mol_type = genomic RNA
gactgcgacagttcgagtctgaagcgagagctaacaacagtatcaacaggtttaatttggatttggaaacgagagtttctggtc

SEQ ID NO: 505 - RNA, 82 nt, Zika virus
  source 1..82: mol_type = genomic RNA
ctgcgacagttcgagtctgaagcgagagctaacaacagtatcaacaggtttaatttggatttggaaacgagagtttctggtc

SEQ ID NO: 506 - RNA, 86 nt, Zika virus; identical to SEQ ID NO: 458
  source 1..86: mol_type = genomic RNA

SEQ ID NO: 507 - RNA, 87 nt, Zika virus; identical to SEQ ID NO: 469
  source 1..87: mol_type = genomic RNA

SEQ ID NO: 508 - RNA, 86 nt, Zika virus; identical to SEQ ID NO: 458
  source 1..86: mol_type = genomic RNA

SEQ ID NO: 509 - RNA, 87 nt, Zika virus; identical to SEQ ID NO: 469
  source 1..87: mol_type = genomic RNA

SEQ ID NO: 510 - RNA, 86 nt, Zika virus
  source 1..86: mol_type = genomic RNA
cagactgcgacagttcgagtctgaagcgaatgctagcaacagtatcaacaggtttaatttggatttggaaacgagagtttctggtc

SEQ ID NO: 511 - RNA, 87 nt, Zika virus; identical to SEQ ID NO: 469
  source 1..87: mol_type = genomic RNA

SEQ ID NO: 512 - RNA, 87 nt, Zika virus; identical to SEQ ID NO: 484
  source 1..87: mol_type = genomic RNA

SEQ ID NO: 513 - RNA, 72 nt, Zika virus
  source 1..72: mol_type = genomic RNA
tcgagtctgaagcgagagctaacaacagtatcaacaggtttaatttggatttggaaacgagagtttctggtc

SEQ ID NO: 514 - RNA, 86 nt, Zika virus; identical to SEQ ID NO: 458
  source 1..86: mol_type = genomic RNA

SEQ ID NO: 515 - RNA, 86 nt, Zika virus; identical to SEQ ID NO: 458
  source 1..86: mol_type = genomic RNA

SEQ ID NO: 516 - RNA, 81 nt, Zika virus
  source 1..81: mol_type = genomic RNA
tgcgacagttcgagtctgaagcgagagctaacaacagtatcaacaggtttaatttggatttggaaacgagagtttctggtc

SEQ ID NO: 517 - RNA, 86 nt, Zika virus; identical to SEQ ID NO: 458
  source 1..86: mol_type = genomic RNA

SEQ ID NO: 518 - RNA, 69 nt, Zika virus; identical to SEQ ID NO: 439
  source 1..69: mol_type = genomic RNA

SEQ ID NO: 519 - RNA, 71 nt, Zika virus
  source 1..71: mol_type = genomic RNA
cgagtctgaagcgaaagctaacaacagtatcaacaggtttaatttggatttggaaacgagagtttctggtc

SEQ ID NO: 520 - RNA, 84 nt, Zika virus; identical to SEQ ID NO: 504
  source 1..84: mol_type = genomic RNA

SEQ ID NO: 521 - RNA, 86 nt, Zika virus; identical to SEQ ID NO: 458
  source 1..86: mol_type = genomic RNA

SEQ ID NO: 522 - RNA, 56 nt, Zika virus
  source 1..56: mol_type = genomic RNA
gctagcaacagtatcaacaggttttattttggatttggaaacgagagtttctggtc

SEQ ID NO: 523 - RNA, 107 nt, Zika virus; identical to SEQ ID NO: 1
  source 1..107: mol_type = genomic RNA

SEQ ID NO: 524 - RNA, 107 nt, Zika virus; identical to SEQ ID NO: 1
  source 1..107: mol_type = genomic RNA

SEQ ID NO: 525 - RNA, 107 nt, Zika virus; identical to SEQ ID NO: 1
  source 1..107: mol_type = genomic RNA

SEQ ID NO: 526 - RNA, 97 nt, Zika virus
  source 1..97: mol_type = genomic RNA
ctgtgtgaatcagactgcgacagttcgagtttgaagcgaaagctgcaacagttatcaacaggttttattttggatttggaaacgagagtttctggtc

SEQ ID NO: 527 - RNA, 108 nt, Zika virus
  source 1..108: mol_type = genomic RNA
gagttgttgatctgtgtgaatcagactgcgacagttcgagtttgaagcgagagctagcaacagtatcaacaggttttattttggatttggaaacgagagtttctggtc

SEQ ID NO: 528 - RNA, 107 nt, Zika virus; identical to SEQ ID NO: 1
  source 1..107: mol_type = genomic RNA

SEQ ID NO: 529 - RNA, 107 nt, Zika virus; identical to SEQ ID NO: 1
  source 1..107: mol_type = genomic RNA

SEQ ID NO: 530 - RNA, 107 nt, Zika virus
  source 1..107: mol_type = genomic RNA
ctcttccgatctgtgtgaatcagactgcgacagttcgagtttgaagcgaaagctagcaacagtatcaacaggttttattttggatttggaaacgagagtttctggtc

SEQ ID NO: 531 - RNA, 107 nt, Zika virus; identical to SEQ ID NO: 1
  source 1..107: mol_type = genomic RNA

SEQ ID NO: 532 - RNA, 107 nt, Zika virus; identical to SEQ ID NO: 1
  source 1..107: mol_type = genomic RNA

SEQ ID NO: 533 - RNA, 107 nt, Zika virus; identical to SEQ ID NO: 1
  source 1..107: mol_type = genomic RNA

SEQ ID NO: 534 - RNA, 107 nt, Zika virus; identical to SEQ ID NO: 1
  source 1..107: mol_type = genomic RNA

SEQ ID NO: 535 - RNA, 107 nt, Zika virus; identical to SEQ ID NO: 1
  source 1..107: mol_type = genomic RNA

SEQ ID NO: 536 - RNA, 107 nt, Zika virus; identical to SEQ ID NO: 1
  source 1..107: mol_type = genomic RNA

SEQ ID NO: 537 - RNA, 106 nt, Zika virus; identical to SEQ ID NO: 325
  source 1..106: mol_type = genomic RNA

SEQ ID NO: 538 - RNA, 107 nt, Zika virus; identical to SEQ ID NO: 330
  source 1..107: mol_type = genomic RNA

SEQ ID NO: 539 - RNA, 100 nt, Zika virus
  source 1..100: mol_type = genomic RNA
gatctgtgtgaatcagactgcgacagttcgagtttgaagcgaaagctagcaacagtatcaacaggttttattttggatttggaaacgagagtttctggtc

SEQ ID NO: 540 - RNA, 103 nt, Zika virus; identical to SEQ ID NO: 406
  source 1..103: mol_type = genomic RNA

SEQ ID NO: 541 - RNA, 100 nt, Zika virus
  source 1..100: mol_type = genomic RNA
gatctgtgtgaatcagactgcgacagttcgagtttgaagcgagagctaacaacagtatcaacaggttttattttggatttggaaacgagagtttctggtc

SEQ ID NO: 542 - RNA, 91 nt, Zika virus
  source 1..91: mol_type = genomic RNA
gactcagactgcgacagttcgagtttgaagcgaaagctagcaacagtatcaacaggttttattttggatttggaaacgagagtttctggtc

SEQ ID NO: 543 - RNA, 87 nt, Zika virus; identical to SEQ ID NO: 417
  source 1..87: mol_type = genomic RNA

SEQ ID NO: 544 - RNA, 89 nt, Zika virus; identical to SEQ ID NO: 454
  source 1..89: mol_type = genomic RNA

SEQ ID NO: 545 - RNA, 60 nt, Zika virus
  source 1..60: mol_type = genomic RNA
gaaagctaacaacagtatcaacaggttttattttggatttggaaacgagagtttctggtc

SEQ ID NO: 546 - RNA, 58 nt, Zika virus
  source 1..58: mol_type = genomic RNA
aagctaacaacagtatcaacaggttttattttggatttggaaacgagagtttctggtc

SEQ ID NO: 547 - RNA, 60 nt, Zika virus; identical to SEQ ID NO: 545
  source 1..60: mol_type = genomic RNA

SEQ ID NO: 548 - RNA, 89 nt, Zika virus; identical to SEQ ID NO: 454
  source 1..89: mol_type = genomic RNA

SEQ ID NO: 549 - RNA, 89 nt, Zika virus; identical to SEQ ID NO: 454
  source 1..89: mol_type = genomic RNA

SEQ ID NO: 550 - RNA, 58 nt, Zika virus; identical to SEQ ID NO: 546
  source 1..58: mol_type = genomic RNA

SEQ ID NO: 551 - RNA, 89 nt, Zika virus; identical to SEQ ID NO: 454
  source 1..89: mol_type = genomic RNA

SEQ ID NO: 552 - RNA, 90 nt, Zika virus
  source 1..90: mol_type = genomic RNA
aatcagactgcgacagttcgagtttgaagcgaaagctagcaacagtatcaacaggttttattttggatttggaaacgagagtttctggtc

SEQ ID NO: 553 - RNA, 107 nt, Zika virus; identical to SEQ ID NO: 1
  source 1..107: mol_type = genomic RNA

SEQ ID NO: 554 - RNA, 86 nt, Zika virus
  source 1..86: mol_type = genomic RNA
agactgcgacagttcgagtttgaagcgaaagctagcaacagtatcaacaggttttattttggatttggaaacgagagtttctggtc

SEQ ID NO: 555 - RNA, 76 nt, Zika virus
  source 1..76: mol_type = genomic RNA
agttcgagtttgaagcgaaagctagcaacagtatcaacaggttttattttggatttggaaacgagagtttctggtc

SEQ ID NO: 556 - RNA, 96 nt, Zika virus
  source 1..96: mol_type = genomic RNA
tgtgtgaatcagactgcgacagttcgagtttgaagcgaaagctagcaacagtatcaacaggttttattttggatttggaaacgagagtttctggtc

SEQ ID NO: 557 - RNA, 107 nt, Zika virus; identical to SEQ ID NO: 1
  source 1..107: mol_type = genomic RNA

SEQ ID NO: 558 - RNA, 94 nt, Zika virus; identical to SEQ ID NO: 335
  source 1..94: mol_type = genomic RNA

SEQ ID NO: 559 - RNA, 94 nt, Zika virus; identical to SEQ ID NO: 335
  source 1..94: mol_type = genomic RNA

SEQ ID NO: 560 - RNA, 107 nt, Zika virus; identical to SEQ ID NO: 1
  source 1..107: mol_type = genomic RNA

SEQ ID NO: 561 - RNA, 105 nt, Zika virus
  source 1..105: mol_type = genomic RNA
gttgttgatctgtgtgaatcagactgcgacagttcgagtttgaagcgagagctaacaacagtatcaacaggtttaatttggatttggaaacgagagtttctggtc

SEQ ID NO: 562 - RNA, 107 nt, Zika virus; identical to SEQ ID NO: 330
  source 1..107: mol_type = genomic RNA

SEQ ID NO: 563 - RNA, 107 nt, Zika virus; identical to SEQ ID NO: 1
  source 1..107: mol_type = genomic RNA

SEQ ID NO: 564 - RNA, 90 nt, Zika virus; identical to SEQ ID NO: 552
  source 1..90: mol_type = genomic RNA

SEQ ID NO: 565 - RNA, 84 nt, Zika virus
  source 1..84: mol_type = genomic RNA
actgcgacagttcgagtttgaagcgaaagctagcaacagtatcaacaggttttattttggatttggaaacgagagtttctggtc

SEQ ID NO: 566 - RNA, 107 nt, Zika virus; identical to SEQ ID NO: 1
  source 1..107: mol_type = genomic RNA

SEQ ID NO: 567 - RNA, 107 nt, Zika virus
  source 1..107: mol_type = genomic RNA
agttgttgatctgtgtgagtcagactgcgacagttcgagtttgaagcgaaagctagcaacagtatcaacaggttttattttggatttggaaacgagagtttctggtc

SEQ ID NO: 568 - RNA, 89 nt, Zika virus
  source 1..89: mol_type = genomic RNA
atcagactgcgacagttcgagtttgaagcgaaagctagcaacagtatcaacaggttttattttggatttggaaacgagagtttctggtc

SEQ ID NO: 569 - RNA, 107 nt, Zika virus
  source 1..107: mol_type = genomic RNA
agttgttactgttgctgactcagactgcgacagttcgagtttgaagcgaaagctagcaacagtatcaacaggttttattttggatttggaaacgagagtttctggtc

SEQ ID NO: 570 - RNA, 107 nt, Zika virus
  source 1..107: mol_type = genomic RNA
agtagttgatctgtgtgaatcagactgcgacagttcgagtttgaagcgaaagctagcaacagtatcaacaggttttattttggatttggaaacgagagtttctggtc

SEQ ID NO: 571 - RNA, 111 nt, Zika virus
  source 1..111: mol_type = genomic RNA
ccggagttgttgatctgtgtgaatcagactgcgacagttcgagtttgaagcgaaagctagcaacagtatcaacaggttttattttggatttggaaacgagagtttctggtc

SEQ ID NO: 572 - RNA, 106 nt, Zika virus; identical to SEQ ID NO: 325
  source 1..106: mol_type = genomic RNA

SEQ ID NO: 573 - RNA, 100 nt, Zika virus; identical to SEQ ID NO: 539
  source 1..100: mol_type = genomic RNA

SEQ ID NO: 574 - RNA, 90 nt, Zika virus; identical to SEQ ID NO: 552
  source 1..90: mol_type = genomic RNA

SEQ ID NO: 575 - RNA, 98 nt, Zika virus; identical to SEQ ID NO: 457
  source 1..98: mol_type = genomic RNA

SEQ ID NO: 576 - RNA, 107 nt, Zika virus; identical to SEQ ID NO: 1
  source 1..107: mol_type = genomic RNA

SEQ ID NO: 577 - RNA, 102 nt, Zika virus
  source 1..102: mol_type = genomic RNA
ttgattgycgtgaatcagactgcgacagttcgagtttgaagcgaaagctagcaacagtatcaacaggttttattttggatttggaaacgagagtttctggtc

SEQ ID NO: 578 - RNA, 102 nt, Zika virus
  source 1..102: mol_type = genomic RNA
ttgatctgygtgaatcagactgcgacagttcgagtttgaagcgaaagctagcaacagtatcaacaggttttattttggatttggaaacgagagtttctggtc

SEQ ID NO: 579 - RNA, 107 nt, Zika virus; identical to SEQ ID NO: 569
  source 1..107: mol_type = genomic RNA

SEQ ID NO: 580 - RNA, 76 nt, Zika virus; identical to SEQ ID NO: 555
  source 1..76: mol_type = genomic RNA

SEQ ID NO: 581 - RNA, 79 nt, Zika virus
  source 1..79: mol_type = genomic RNA
gacagttcgagtttgaagcgaaagctaacaacagtatcaacaggttttattttggatttggaaacgagagtttctggtc

SEQ ID NO: 582 - RNA, 72 nt, Zika virus
  source 1..72: mol_type = genomic RNA
cgagtttgaagcgaaagctagcaacagtatcaacaggttttattttggatttggaaacgagagtttctggtc

SEQ ID NO: 583 - RNA, 91 nt, Zika virus; identical to SEQ ID NO: 343
  source 1..91: mol_type = genomic RNA

SEQ ID NO: 584 - RNA, 98 nt, Zika virus; identical to SEQ ID NO: 457
  source 1..98: mol_type = genomic RNA

SEQ ID NO: 585 - RNA, 78 nt, Zika virus
  source 1..78: mol_type = genomic RNA
gacagttcgagtttgaagcgagagctaacaacagtatcaacaggtttaatttggatttggaaacgagagtttctggtc

SEQ ID NO: 586 - RNA, 98 nt, Zika virus; identical to SEQ ID NO: 457
  source 1..98: mol_type = genomic RNA

SEQ ID NO: 587 - RNA, 89 nt, Zika virus; identical to SEQ ID NO: 568
  source 1..89: mol_type = genomic RNA

SEQ ID NO: 588 - RNA, 70 nt, Zika virus; identical to SEQ ID NO: 438
  source 1..70: mol_type = genomic RNA

SEQ ID NO: 589 - RNA, 90 nt, Zika virus
  source 1..90: mol_type = genomic RNA
gaatcagactgcgacagttcgagtttgaagcgaaagctagcaacagtatcaacaggttttatttggatttggaaacgagagtttctggtc

SEQ ID NO: 590 - RNA, 96 nt, Zika virus; identical to SEQ ID NO: 556
  source 1..96: mol_type = genomic RNA

SEQ ID NO: 591 - RNA, 90 nt, Zika virus; identical to SEQ ID NO: 552
  source 1..90: mol_type = genomic RNA

SEQ ID NO: 592 - RNA, 106 nt, Zika virus; identical to SEQ ID NO: 325
  source 1..106: mol_type = genomic RNA

SEQ ID NO: 593 - RNA, 107 nt, Zika virus; identical to SEQ ID NO: 1
  source 1..107: mol_type = genomic RNA

SEQ ID NO: 594 - RNA, 107 nt, Zika virus; identical to SEQ ID NO: 1
  source 1..107: mol_type = genomic RNA

SEQ ID NO: 595 - RNA, 107 nt, Zika virus; identical to SEQ ID NO: 1
  source 1..107: mol_type = genomic RNA

SEQ ID NO: 596 - RNA, 106 nt, Zika virus; identical to SEQ ID NO: 389
  source 1..106: mol_type = genomic RNA

SEQ ID NO: 597 - RNA, 107 nt, Zika virus; identical to SEQ ID NO: 1
  source 1..107: mol_type = genomic RNA

SEQ ID NO: 598 - RNA, 107 nt, Zika virus; identical to SEQ ID NO: 569
  source 1..107: mol_type = genomic RNA

SEQ ID NO: 599 - RNA, 107 nt, Zika virus; identical to SEQ ID NO: 1
  source 1..107: mol_type = genomic RNA

SEQ ID NO: 600 - RNA, 421 nt, Zika virus
  source 1..421: mol_type = genomic RNA
gtctcacacactgtggacagatggagtggaagaaagtgatctgatcatacccaagtccttagctggtccactcagccaccacaacaccagagagggttacagaactcaagtgaaagggccatggcatagtgaagagctcgaaatccggtttgaggagtgcccaggaaccaaggttcacgtggaggagacatgcggaactagaggaccatctctgagatcaactactgctagtggaagggtcatagaggaatggtgctgtagggaatgcacaatgcctccactatcgttccgggcgaaagacggctgctggtatggaatggagataaggcccagaaaggaaccagagagcaacttagtgaggtccatgctaacaacagtatcaacaggtttaatttggatttggaaacgagagtttctggtc

SEQ ID NO: 601 - RNA, 78 nt, Zika virus
  source 1..78: mol_type = genomic RNA
acagttcgagtttgaagcgaaagctagcaacagtatcaacaggttttattttggatttggaaacgagagtttctggtc

SEQ ID NO: 602 - RNA, 71 nt, Zika virus
  source 1..71: mol_type = genomic RNA
gaatttgaagcgaatgctaacaacagtatcaacaggttttattttggatttggaaacgagagtttctggtc

SEQ ID NO: 603 - RNA, 56 nt, Zika virus
  source 1..56: mol_type = genomic RNA
gctaacaacagtatcaacaggttttattttggatttggaaacgagagtttctggtc

SEQ ID NO: 604 - RNA, 56 nt, Zika virus; identical to SEQ ID NO: 603
  source 1..56: mol_type = genomic RNA

SEQ ID NO: 605 - RNA, 104 nt, Zika virus
  source 1..104: mol_type = genomic RNA
gttgtttctgtgtgaatcagactgcgacagttcgagtttgaagcgaaagctagcaacagtatcaacaggttttattttggatttggaaacgagagtttctggtc

SEQ ID NO: 606 - RNA, 79 nt, Zika virus; identical to SEQ ID NO: 361
  source 1..79: mol_type = genomic RNA

SEQ ID NO: 607 - RNA, 90 nt, Zika virus; identical to SEQ ID NO: 552
  source 1..90: mol_type = genomic RNA

SEQ ID NO: 608 - RNA, 107 nt, Zika virus; identical to SEQ ID NO: 569
  source 1..107: mol_type = genomic RNA

SEQ ID NO: 609 - RNA, 106 nt, Zika virus; identical to SEQ ID NO: 352
  source 1..106: mol_type = genomic RNA

SEQ ID NO: 610 - RNA, 106 nt, Zika virus; identical to SEQ ID NO: 352
  source 1..106: mol_type = genomic RNA

SEQ ID NO: 611 - RNA, 107 nt, Zika virus; identical to SEQ ID NO: 1
  source 1..107: mol_type = genomic RNA

SEQ ID NO: 612 - RNA, 106 nt, Zika virus; identical to SEQ ID NO: 325
  source 1..106: mol_type = genomic RNA

SEQ ID NO: 613 - RNA, 106 nt, Zika virus; identical to SEQ ID NO: 352
  source 1..106: mol_type = genomic RNA

SEQ ID NO: 614 - RNA, 99 nt, Zika virus
  source 1..99: mol_type = genomic RNA
ctgtgtgtgaatcagactgcgacagttcgagtttgaagcgaaagctagcaacagtatcaacaggttttattttggatttggaaacgagagtttctggtc

SEQ ID NO: 615 - RNA, 107 nt, Zika virus; identical to SEQ ID NO: 1
  source 1..107: mol_type = genomic RNA

SEQ ID NO: 616 - RNA, 107 nt, Zika virus; identical to SEQ ID NO: 1
  source 1..107: mol_type = genomic RNA

SEQ ID NO: 617 - RNA, 47 nt, Zika virus
  source 1..47: mol_type = genomic RNA
agtatcaacaggttttattttggatttggaaacgagagtttctggtc

SEQ ID NO: 618 - RNA, 47 nt, Zika virus; identical to SEQ ID NO: 617
  source 1..47: mol_type = genomic RNA

SEQ ID NO: 619 - RNA, 107 nt, Zika virus; identical to SEQ ID NO: 1
  source 1..107: mol_type = genomic RNA

SEQ ID NO: 620 - RNA, 107 nt, Zika virus; identical to SEQ ID NO: 1
  source 1..107: mol_type = genomic RNA

SEQ ID NO: 621 - RNA, 104 nt, Zika virus; identical to SEQ ID NO: 605
  source 1..104: mol_type = genomic RNA

SEQ ID NO: 622 - RNA, 105 nt, Zika virus; identical to SEQ ID NO: 355
  source 1..105: mol_type = genomic RNA

SEQ ID NO: 623 - RNA, 100 nt, Zika virus
  source 1..100: mol_type = genomic RNA
ccaatctgtgaatcagactgcgacagttcgagtttgaagcgaaagctagcaacagtatcaacaggttttattttggatttggaaacgagagtttctggtc

SEQ ID NO: 624 - RNA, 78 nt, Zika virus
  source 1..78: mol_type = genomic RNA
gacagttcgagtttgaagcgaaagctagcaacagtatcaacaggttttatttggatttggaaacgagagtttctggtc

SEQ ID NO: 625 - RNA, 107 nt, Zika virus; identical to SEQ ID NO: 1
  source 1..107: mol_type = genomic RNA

SEQ ID NO: 626 - RNA, 107 nt, Zika virus; identical to SEQ ID NO: 1
  source 1..107: mol_type = genomic RNA

SEQ ID NO: 627 - RNA, 107 nt, Zika virus; identical to SEQ ID NO: 1
  source 1..107: mol_type = genomic RNA

SEQ ID NO: 628 - RNA, 106 nt, Zika virus
  source 1..106: mol_type = genomic RNA
agttgttactgttgctgactcagactgcgacagttcgagtttgaagcgaaagctagcaacagtatcaacaggttttatttggatttggaaacgagagtttctggtc

SEQ ID NO: 629 - RNA, 106 nt, Zika virus; identical to SEQ ID NO: 389
  source 1..106: mol_type = genomic RNA

SEQ ID NO: 630 - RNA, 105 nt, Zika virus; identical to SEQ ID NO: 355
  source 1..105: mol_type = genomic RNA

SEQ ID NO: 631 - RNA, 106 nt, Zika virus; identical to SEQ ID NO: 325
  source 1..106: mol_type = genomic RNA

SEQ ID NO: 632 - RNA, 107 nt, Zika virus; identical to SEQ ID NO: 1
  source 1..107: mol_type = genomic RNA

SEQ ID NO: 633 - RNA, 106 nt, Zika virus; identical to SEQ ID NO: 325
  source 1..106: mol_type = genomic RNA

SEQ ID NO: 634 - protein, 122 aa, Zika virus; identical to SEQ ID NO: 3

SEQ ID NO: 635 - protein, 117 aa, Zika virus
KKSGGFRIVNMLKRGVARVSPFGGLKRLPAGLLLGHGPIRMVLAILAFLRFTAIKPSLGLINRWGSVGKKEAMEIIKKFKKDLAAMLRIINARKEKKRRGADTSVGIVGLLLTTAMA

SEQ ID NO: 636 - protein, 104 aa, Zika virus
MKNPKKKSGGFRIVNMLKRGVARVSPFGGLKRLPAGLLLGHGPIRMVLAILAFLRFTAIKPSLGLINRWGSVGKKEAMEIIKKFKKDLAAMLRIINARKEKKRR

SEQ ID NO: 637 - protein, 97 aa, Zika virus
KKSGGFRIVNMLKRGVARVSPFGGLKRLPAGLLLGHGPIRMVLAILAFLRFTAIKPSLGLINRWGSVGKKEAMEIIKKFKKDLAAMLRIINARKEKK

SEQ ID NO: 638 - protein, 122 aa, Zika virus; identical to SEQ ID NO: 3

SEQ ID NO: 639 - protein, 104 aa, Zika virus; identical to SEQ ID NO: 636

SEQ ID NO: 640 - protein, 117 aa, Zika virus; identical to SEQ ID NO: 635

SEQ ID NO: 641 - protein, 104 aa, Zika virus
MKNPKEEIRRIRIVNMLKRGVARVNPLGGLKRLPAGLLLGHGPIRMVLAILAFLRFTAIKPSLGLINRWGSVGKKEAMEIIKKFKKDLAAMLRIINARKERKRR

SEQ ID NO: 642 - protein, 91 aa, Zika virus
RIVNMLKRGVARVNPLGGLKRLPAGLLLGHGPIRMVLAILAFLRFTAIKPSLGLINRWGSVGKKEAMEIIKKFKKDLAAMLRIINARKERK

SEQ ID NO: 643 - protein, 122 aa, Zika virus
MKNPKEEIRRIRIVNMLKRGVARVNPLGGLKRLPAGLLLGHGPIRMVLAILAFLRFTAIKPSLGLINRWGSVGKKEAMEIIKKFKKDLAAMLRIINARKERKRRGADTSIGIIGLLLTTAMA

SEQ ID NO: 644 - protein, 111 aa, Zika virus
RIVNMLKRGVARVNPLGGLKRLPAGLLLGHGPIRMVLAILAFLRFTAIKPSLGLINRWGSVGKKEAMEIIKKFKKDLAAMLRIINARKERKRRGADTSIGIIGLLLTTAMA

SEQ ID NO: 645 - protein, 104 aa, Zika virus; identical to SEQ ID NO: 641

SEQ ID NO: 646 - protein, 111 aa, Zika virus; identical to SEQ ID NO: 644

SEQ ID NO: 647 - protein, 122 aa, Zika virus; identical to SEQ ID NO: 3

SEQ ID NO: 648 - protein, 104 aa, Zika virus; identical to SEQ ID NO: 636

SEQ ID NO: 649 - protein, 117 aa, Zika virus; identical to SEQ ID NO: 635

SEQ ID NO: 650 - protein, 122 aa, Zika virus; identical to SEQ ID NO: 3

SEQ ID NO: 651 - protein, 104 aa, Zika virus; identical to SEQ ID NO: 636

SEQ ID NO: 652 - protein, 117 aa, Zika virus; identical to SEQ ID NO: 635

SEQ ID NO: 653 - protein, 122 aa, Zika virus; identical to SEQ ID NO: 3

SEQ ID NO: 654 - protein, 104 aa, Zika virus; identical to SEQ ID NO: 636

SEQ ID NO: 655 - protein, 122 aa, Zika virus
MKNPKKKSGGFRIVNMLKRGVARVSPFGGLKRLPAGLLLGHGPIRMVLAILAFLRFTAIKPSLGLINRWGSVGKKEAMEIIKKFKKDLAAMLRIINARKEKKRRGAETSVGIVGLLLTTAMA

SEQ ID NO: 656 - protein, 104 aa, Zika virus; identical to SEQ ID NO: 636

SEQ ID NO: 657 - protein, 117 aa, Zika virus
KKSGGFRIVNMLKRGVARVSPFGGLKRLPAGLLLGHGPIRMVLAILAFLRFTAIKPSLGLINRWGSVGKKEAMEIIKKFKKDLAAMLRIINARKEKKRRGAETSVGIVGLLLTTAMA

SEQ ID NO: 658 - protein, 122 aa, Zika virus
MKNPKKKSGGFRIVNMLKRGVARVSPFGGLKRLPAGLLLGHGPIRMVLAILAFLRFTAIKPSLGLINRWGSVGKKEAMEIIKKFKKDLAAMLRIINARKEKKRRGADASVGIVSLLLTTAMA

SEQ ID NO: 659 - protein, 104 aa, Zika virus; identical to SEQ ID NO: 636

SEQ ID NO: 660 - protein, 117 aa, Zika virus
KKSGGFRIVNMLKRGVARVSPFGGLKRLPAGLLLGHGPIRMVLAILAFLRFTAIKPSLGLINRWGSVGKKEAMEIIKKFKKDLAAMLRIINARKEKKRRGADASVGIVSLLLTTAMA

SEQ ID NO: 661 - protein, 122 aa, Zika virus; identical to SEQ ID NO: 3

SEQ ID NO: 662 - protein, 104 aa, Zika virus; identical to SEQ ID NO: 636

SEQ ID NO: 663 - protein, 117 aa, Zika virus; identical to SEQ ID NO: 635

SEQ ID NO: 664 - protein, 122 aa, Zika virus; identical to SEQ ID NO: 3

SEQ ID NO: 665 - protein, 104 aa, Zika virus; identical to SEQ ID NO: 636

SEQ ID NO: 666 - protein, 117 aa, Zika virus; identical to SEQ ID NO: 635

SEQ ID NO: 667 - protein, 122 aa, Zika virus
MKNPKKKSGGFRIVNMLKRGVARVSPFGGLKRLPAGLLLGHGPIRMVLAILAFLRFTAIKPSLGLINRWGSVGKKEAMEIIKKFKKDLAAMLRIINARKEKKRRGTDTSVGIVGLLLTTAMA

SEQ ID NO: 668 - protein, 104 aa, Zika virus; identical to SEQ ID NO: 636

SEQ ID NO: 669 - protein, 117 aa, Zika virus
KKSGGFRIVNMLKRGVARVSPFGGLKRLPAGLLLGHGPIRMVLAILAFLRFTAIKPSLGLINRWGSVGKKEAMEIIKKFKKDLAAMLRIINARKEKKRRGTDTSVGIVGLLLTTAMA

SEQ ID NO: 670 - protein, 122 aa, Zika virus; identical to SEQ ID NO: 3

SEQ ID NO: 671 - protein, 104 aa, Zika virus; identical to SEQ ID NO: 636

SEQ ID NO: 672 - protein, 117 aa, Zika virus; identical to SEQ ID NO: 635

SEQ ID NO: 673 - protein, 122 aa, Zika virus; identical to SEQ ID NO: 3

SEQ ID NO: 674 - protein, 104 aa, Zika virus; identical to SEQ ID NO: 636

SEQ ID NO: 675 - protein, 117 aa, Zika virus; identical to SEQ ID NO: 635

SEQ ID NO: 676 - protein, 122 aa, Zika virus; identical to SEQ ID NO: 3

SEQ ID NO: 677 - protein, 104 aa, Zika virus; identical to SEQ ID NO: 636

SEQ ID NO: 678 - protein, 117 aa, Zika virus; identical to SEQ ID NO: 635

SEQ ID NO: 679 - protein, 122 aa, Zika virus; identical to SEQ ID NO: 3

SEQ ID NO: 680 - protein, 104 aa, Zika virus; identical to SEQ ID NO: 636

SEQ ID NO: 681 - protein, 117 aa, Zika virus; identical to SEQ ID NO: 635

SEQ ID NO: 682 - protein, 122 aa, Zika virus; identical to SEQ ID NO: 667

SEQ ID NO: 683 - protein, 104 aa, Zika virus; identical to SEQ ID NO: 636

SEQ ID NO: 684 - protein, 117 aa, Zika virus; identical to SEQ ID NO: 669

SEQ ID NO: 685 - protein, 122 aa, Zika virus; identical to SEQ ID NO: 3

SEQ ID NO: 686 - protein, 104 aa, Zika virus; identical to SEQ ID NO: 636

SEQ ID NO: 687 - protein, 117 aa, Zika virus; identical to SEQ ID NO: 635

SEQ ID NO: 688 - protein, 122 aa, Zika virus; identical to SEQ ID NO: 3

SEQ ID NO: 689 - protein, 104 aa, Zika virus; identical to SEQ ID NO: 636

SEQ ID NO: 690 - protein, 117 aa, Zika virus; identical to SEQ ID NO: 635

SEQ ID NO: 691 - protein, 122 aa, Zika virus; identical to SEQ ID NO: 3

SEQ ID NO: 692 - protein, 104 aa, Zika virus; identical to SEQ ID NO: 636

SEQ ID NO: 693 - protein, 117 aa, Zika virus; identical to SEQ ID NO: 635

SEQ ID NO: 694 - protein, 122 aa, Zika virus; identical to SEQ ID NO: 667

SEQ ID NO: 695 - protein, 104 aa, Zika virus; identical to SEQ ID NO: 636

SEQ ID NO: 696 - protein, 117 aa, Zika virus; identical to SEQ ID NO: 669

SEQ ID NO: 697 - protein, 122 aa, Zika virus; identical to SEQ ID NO: 667

SEQ ID NO: 698 - protein, 104 aa, Zika virus; identical to SEQ ID NO: 636

SEQ ID NO: 699 - protein, 117 aa, Zika virus; identical to SEQ ID NO: 669

SEQ ID NO: 700 - protein, 122 aa, Zika virus; identical to SEQ ID NO: 667

SEQ ID NO: 701 - protein, 104 aa, Zika virus; identical to SEQ ID NO: 636

SEQ ID NO: 702 - protein, 117 aa, Zika virus; identical to SEQ ID NO: 669

SEQ ID NO: 703 - protein, 117 aa, Zika virus; identical to SEQ ID NO: 635

SEQ ID NO: 704 - protein, 117 aa, Zika virus
KKSGGFRIVNMLKRGVARVNPLGGLKRLPAGLLLGHGPIRMVLAILAFLRFTAIKPSLGLINRWGTVGKKEAMEIIKKFKKDLAAMLRIINARKERKRRGADTSIGIVGLLLTTAMA

SEQ ID NO: 705 - protein, 122 aa, Zika virus; identical to SEQ ID NO: 3

SEQ ID NO: 706 - protein, 117 aa, Zika virus; identical to SEQ ID NO: 635

SEQ ID NO: 707 - protein, 122 aa, Zika virus; identical to SEQ ID NO: 3

SEQ ID NO: 708 - protein, 117 aa, Zika virus; identical to SEQ ID NO: 635

SEQ ID NO: 709 - protein, 122 aa, Zika virus; identical to SEQ ID NO: 667

SEQ ID NO: 710 - protein, 104 aa, Zika virus; identical to SEQ ID NO: 636

SEQ ID NO: 711 - protein, 117 aa, Zika virus; identical to SEQ ID NO: 669

SEQ ID NO: 712 - protein, 117 aa, Zika virus; identical to SEQ ID NO: 635

SEQ ID NO: 713 - protein, 122 aa, Zika virus; identical to SEQ ID NO: 3

SEQ ID NO: 714 - protein, 117 aa, Zika virus; identical to SEQ ID NO: 635

SEQ ID NO: 715 - protein, 122 aa, Zika virus; identical to SEQ ID NO: 3

SEQ ID NO: 716 - protein, 104 aa, Zika virus; identical to SEQ ID NO: 636

SEQ ID NO: 717 - protein, 117 aa, Zika virus; identical to SEQ ID NO: 635

SEQ ID NO: 718 - protein, 122 aa, Zika virus; identical to SEQ ID NO: 3

SEQ ID NO: 719 - protein, 104 aa, Zika virus; identical to SEQ ID NO: 636

SEQ ID NO: 720 - protein, 117 aa, Zika virus; identical to SEQ ID NO: 635

SEQ ID NO: 721 - protein, 122 aa, Zika virus; identical to SEQ ID NO: 3

SEQ ID NO: 722 - protein, 104 aa, Zika virus; identical to SEQ ID NO: 636

SEQ ID NO: 723 - protein, 117 aa, Zika virus; identical to SEQ ID NO: 635

SEQ ID NO: 724 - protein, 122 aa, Zika virus
MKNPKKKSGGFRIVNMLKRGVARVSPFGGLKRLPAGLLLGHGPIRMVLATLAFLRFTAIKPSLGLINRWGSVGKKEAMEIIKKFKKDLAAMLRIINARKEKKRRGADTSVGIVGLLLTTAMA

SEQ ID NO: 725 - protein, 104 aa, Zika virus
MKNPKKKSGGFRIVNMLKRGVARVSPFGGLKRLPAGLLLGHGPIRMVLATLAFLRFTAIKPSLGLINRWGSVGKKEAMEIIKKFKKDLAAMLRIINARKEKKRR

SEQ ID NO: 726 - protein, 117 aa, Zika virus
KKSGGFRIVNMLKRGVARVSPFGGLKRLPAGLLLGHGPIRMVLATLAFLRFTAIKPSLGLINRWGSVGKKEAMEIIKKFKKDLAAMLRIINARKEKKRRGADTSVGIVGLLLTTAMA

SEQ ID NO: 727 - protein, 122 aa, Zika virus; identical to SEQ ID NO: 724

SEQ ID NO: 728 - protein, 104 aa, Zika virus; identical to SEQ ID NO: 725

SEQ ID NO: 729 - protein, 117 aa, Zika virus; identical to SEQ ID NO: 726

SEQ ID NO: 730 - protein, 122 aa, Zika virus; identical to SEQ ID NO: 3

SEQ ID NO: 731 - protein, 117 aa, Zika virus; identical to SEQ ID NO: 635

SEQ ID NO: 732 - protein, 117 aa, Zika virus; identical to SEQ ID NO: 635

SEQ ID NO: 733 - protein, 117 aa, Zika virus; identical to SEQ ID NO: 635

SEQ ID NO: 734 - protein, 117 aa, Zika virus; identical to SEQ ID NO: 635

SEQ ID NO: 735 - protein, 122 aa, Zika virus; identical to SEQ ID NO: 3

SEQ ID NO: 736 - protein, 104 aa, Zika virus; identical to SEQ ID NO: 636

SEQ ID NO: 737 - protein, 117 aa, Zika virus; identical to SEQ ID NO: 635

SEQ ID NO: 738 - protein, 122 aa, Zika virus; identical to SEQ ID NO: 3

SEQ ID NO: 739 - protein, 104 aa, Zika virus; identical to SEQ ID NO: 636

SEQ ID NO: 740 - protein, 117 aa, Zika virus; identical to SEQ ID NO: 635

SEQ ID NO: 741 - protein, 122 aa, Zika virus; identical to SEQ ID NO: 3

SEQ ID NO: 742 - protein, 104 aa, Zika virus; identical to SEQ ID NO: 636

SEQ ID NO: 743 - protein, 117 aa, Zika virus; identical to SEQ ID NO: 635

SEQ ID NO: 744 - protein, 122 aa, Zika virus; identical to SEQ ID NO: 3

SEQ ID NO: 745 - protein, 104 aa, Zika virus; identical to SEQ ID NO: 636

SEQ ID NO: 746 - protein, 117 aa, Zika virus; identical to SEQ ID NO: 635

SEQ ID NO: 747 - protein, 122 aa, Zika virus; identical to SEQ ID NO: 3

SEQ ID NO: 748 - protein, 104 aa, Zika virus; identical to SEQ ID NO: 636

SEQ ID NO: 749 - protein, 117 aa, Zika virus; identical to SEQ ID NO: 635

SEQ ID NO: 750 - protein, 122 aa, Zika virus; identical to SEQ ID NO: 3

SEQ ID NO: 751 - protein, 104 aa, Zika virus; identical to SEQ ID NO: 636

SEQ ID NO: 752 - protein, 117 aa, Zika virus; identical to SEQ ID NO: 635

SEQ ID NO: 753 - protein, 122 aa, Zika virus; identical to SEQ ID NO: 655

SEQ ID NO: 754 - protein, 104 aa, Zika virus; identical to SEQ ID NO: 636

SEQ ID NO: 755 - protein, 117 aa, Zika virus; identical to SEQ ID NO: 657

SEQ ID NO: 756 - protein, 122 aa, Zika virus; identical to SEQ ID NO: 655

SEQ ID NO: 757 - protein, 104 aa, Zika virus; identical to SEQ ID NO: 636

SEQ ID NO: 758 - protein, 117 aa, Zika virus; identical to SEQ ID NO: 657

SEQ ID NO: 759 - protein, 122 aa, Zika virus
MKNPKKKSGGFRIVNMLKRGVARVSPFGGLKRLPAGLLLGHGPIRMVLAILAFLRFTAIKPSLGLINRWGSVGKKEAMEIIKKFKKDLAAMLRIINARKEKKRRGADASVGIVGLLLTTAMA

SEQ ID NO: 760 - protein, 104 aa, Zika virus; identical to SEQ ID NO: 636

SEQ ID NO: 761 - protein, 117 aa, Zika virus
KKSGGFRIVNMLKRGVARVSPFGGLKRLPAGLLLGHGPIRMVLAILAFLRFTAIKPSLGLINRWGSVGKKEAMEIIKKFKKDLAAMLRIINARKEKKRRGADASVGIVGLLLTTAMA

SEQ ID NO: 762 - protein, 117 aa, Zika virus; identical to SEQ ID NO: 657

SEQ ID NO: 763 - protein, 117 aa, Zika virus; identical to SEQ ID NO: 657

SEQ ID NO: 764 - protein, 117 aa, Zika virus; identical to SEQ ID NO: 657

SEQ ID NO: 765 - protein, 122 aa, Zika virus
MKNPKKKSGGFRIVNMLKRGVARVSPFGGLKRLPAGLLLGHGPIRMVLAILAFLRFTAIKPSLGLINRWGSVGKKEAMETIKKFKKDLAAMLRIINARKEKKRRGADTSVGIVGLLLTTAMA

SEQ ID NO: 766 - protein, 104 aa, Zika virus
MKNPKKKSGGFRIVNMLKRGVARVSPFGGLKRLPAGLLLGHGPIRMVLAILAFLRFTAIKPSLGLINRWGSVGKKEAMETIKKFKKDLAAMLRIINARKEKKRR

SEQ ID NO: 767 - protein, 117 aa, Zika virus
KKSGGFRIVNMLKRGVARVSPFGGLKRLPAGLLLGHGPIRMVLAILAFLRFTAIKPSLGLINRWGSVGKKEAMETIKKFKKDLAAMLRIINARKEKKRRGADTSVGIVGLLLTTAMA

SEQ ID NO: 768 - protein, 122 aa, Zika virus; identical to SEQ ID NO: 765

SEQ ID NO: 769 - protein, 104 aa, Zika virus; identical to SEQ ID NO: 766

SEQ ID NO: 770 - protein, 117 aa, Zika virus; identical to SEQ ID NO: 767

SEQ ID NO: 771 - protein, 122 aa, Zika virus; identical to SEQ ID NO: 765

SEQ ID NO: 772 - protein, 104 aa, Zika virus; identical to SEQ ID NO: 766

SEQ ID NO: 773 - protein, 117 aa, Zika virus; identical to SEQ ID NO: 767

SEQ ID NO: 774 - protein, 122 aa, Zika virus; identical to SEQ ID NO: 765

SEQ ID NO: 775 - protein, 104 aa, Zika virus; identical to SEQ ID NO: 766

SEQ ID NO: 776 - protein, 117 aa, Zika virus; identical to SEQ ID NO: 767

SEQ ID NO: 777 - protein, 122 aa, Zika virus; identical to SEQ ID NO: 765

SEQ ID NO: 778 - protein, 104 aa, Zika virus; identical to SEQ ID NO: 766

SEQ ID NO: 779 - protein, 117 aa, Zika virus; identical to SEQ ID NO: 767

SEQ ID NO: 780 - protein, 122 aa, Zika virus; identical to SEQ ID NO: 765

SEQ ID NO: 781 - protein, 104 aa, Zika virus; identical to SEQ ID NO: 766

SEQ ID NO: 782 - protein, 117 aa, Zika virus; identical to SEQ ID NO: 767

SEQ ID NO: 783 - protein, 122 aa, Zika virus; identical to SEQ ID NO: 765

SEQ ID NO: 784 - protein, 104 aa, Zika virus; identical to SEQ ID NO: 766

SEQ ID NO: 785 - protein, 117 aa, Zika virus; identical to SEQ ID NO: 767

SEQ ID NO: 786 - protein, 122 aa, Zika virus; identical to SEQ ID NO: 765

SEQ ID NO: 787 - protein, 104 aa, Zika virus; identical to SEQ ID NO: 766

SEQ ID NO: 788 - protein, 117 aa, Zika virus; identical to SEQ ID NO: 767

SEQ ID NO: 789 - protein, 122 aa, Zika virus; identical to SEQ ID NO: 765

SEQ ID NO: 790 - protein, 104 aa, Zika virus; identical to SEQ ID NO: 766

SEQ ID NO: 791 - protein, 117 aa, Zika virus; identical to SEQ ID NO: 767

SEQ ID NO: 792 - protein, 122 aa, Zika virus; identical to SEQ ID NO: 765

SEQ ID NO: 793 - protein, 104 aa, Zika virus; identical to SEQ ID NO: 766

SEQ ID NO: 794 - protein, 117 aa, Zika virus; identical to SEQ ID NO: 767

SEQ ID NO: 795 - protein, 122 aa, Zika virus; identical to SEQ ID NO: 3

SEQ ID NO: 796 - protein, 104 aa, Zika virus; identical to SEQ ID NO: 636

SEQ ID NO: 797 - protein, 117 aa, Zika virus; identical to SEQ ID NO: 635

SEQ ID NO: 798 - protein, 122 aa, Zika virus; identical to SEQ ID NO: 3

SEQ ID NO: 799 - protein, 104 aa, Zika virus; identical to SEQ ID NO: 636

SEQ ID NO: 800 - protein, 117 aa, Zika virus; identical to SEQ ID NO: 635

SEQ ID NO: 801 - protein, 117 aa, Zika virus
RKSGGFRIVNMLKRGVARVNPLGGLKRLPAGLLLGHGPIRMVLAILAFLRFTAIKPSLGLINRWGSVGKKEAMEIIKKFKKDLAAMLRIINARKERKRRGADTSIGIVGLLLTTAMA

SEQ ID NO: 802 - protein, 117 aa, Zika virus; identical to SEQ ID NO: 767

SEQ ID NO: 803 - protein, 117 aa, Zika virus; identical to SEQ ID NO: 635

SEQ ID NO: 804 - protein, 117 aa, Zika virus; identical to SEQ ID NO: 635

SEQ ID NO: 805 - protein, 117 aa, Zika virus; identical to SEQ ID NO: 635

SEQ ID NO: 806 - protein, 117 aa, Zika virus; identical to SEQ ID NO: 635

SEQ ID NO: 807 - protein, 117 aa, Zika virus; identical to SEQ ID NO: 635

SEQ ID NO: 808 - protein, 117 aa, Zika virus; identical to SEQ ID NO: 635

SEQ ID NO: 809 - protein, 117 aa, Zika virus; identical to SEQ ID NO: 635

SEQ ID NO: 810 - protein, 117 aa, Zika virus; identical to SEQ ID NO: 635

SEQ ID NO: 811 - protein, 117 aa, Zika virus; identical to SEQ ID NO: 635

SEQ ID NO: 812 - protein, 117 aa, Zika virus; identical to SEQ ID NO: 635

SEQ ID NO: 813 - protein, 117 aa, Zika virus; identical to SEQ ID NO: 635

SEQ ID NO: 814 - protein, 117 aa, Zika virus; identical to SEQ ID NO: 635

SEQ ID NO: 815 - protein, 117 aa, Zika virus; identical to SEQ ID NO: 635

SEQ ID NO: 816 - protein, 117 aa, Zika virus; identical to SEQ ID NO: 635

SEQ ID NO: 817 - protein, 117 aa, Zika virus; identical to SEQ ID NO: 635

SEQ ID NO: 818 - protein, 117 aa, Zika virus; identical to SEQ ID NO: 635

SEQ ID NO: 819 - protein, 117 aa, Zika virus; identical to SEQ ID NO: 635

SEQ ID NO: 820 - protein, 117 aa, Zika virus; identical to SEQ ID NO: 635

SEQ ID NO: 821 - protein, 117 aa, Zika virus; identical to SEQ ID NO: 635

SEQ ID NO: 822 - protein, 117 aa, Zika virus; identical to SEQ ID NO: 635

SEQ ID NO: 823 - protein, 117 aa, Zika virus; identical to SEQ ID NO: 635

SEQ ID NO: 824 - protein, 117 aa, Zika virus
KKSGGFRIVNMLKRGVARVNPLGGLKRLPAGLLLGHGPIRMVLAILAFLRFTAIKPSLGLINRWGSVGKKEAMEIIKKFKKDLAAMLRIINARKERKRRGADTSIGIIGLLLTTAMA

SEQ ID NO: 825 - protein, 117 aa, Zika virus; identical to SEQ ID NO: 635

SEQ ID NO: 826 - protein, 117 aa, Zika virus; identical to SEQ ID NO: 635

SEQ ID NO: 827 - protein, 117 aa, Zika virus; identical to SEQ ID NO: 669

SEQ ID NO: 828 - protein, 117 aa, Zika virus; identical to SEQ ID NO: 669

SEQ ID NO: 829 - protein, 104 aa, Zika virus; identical to SEQ ID NO: 766

SEQ ID NO: 830 - protein, 117 aa, Zika virus; identical to SEQ ID NO: 767

SEQ ID NO: 831 - protein, 104 aa, Zika virus; identical to SEQ ID NO: 766

SEQ ID NO: 832 - protein, 117 aa, Zika virus; identical to SEQ ID NO: 767

SEQ ID NO: 833 - protein, 104 aa, Zika virus; identical to SEQ ID NO: 766

SEQ ID NO: 834 - protein, 117 aa, Zika virus; identical to SEQ ID NO: 767

SEQ ID NO: 835 - protein, 117 aa, Zika virus; identical to SEQ ID NO: 801

SEQ ID NO: 836 - protein, 122 aa, Zika virus; identical to SEQ ID NO: 3

SEQ ID NO: 837 - protein, 117 aa, Zika virus; identical to SEQ ID NO: 635

SEQ ID NO: 838 - protein, 122 aa, Zika virus; identical to SEQ ID NO: 3

SEQ ID NO: 839 - protein, 117 aa, Zika virus; identical to SEQ ID NO: 635

SEQ ID NO: 840 - protein, 122 aa, Zika virus; identical to SEQ ID NO: 3

SEQ ID NO: 841 - protein, 117 aa, Zika virus; identical to SEQ ID NO: 635

SEQ ID NO: 842 - protein, 117 aa, Zika virus; identical to SEQ ID NO: 657

SEQ ID NO: 843 - protein, 117 aa, Zika virus; identical to SEQ ID NO: 635

SEQ ID NO: 844 - protein, 117 aa, Zika virus; identical to SEQ ID NO: 635

SEQ ID NO: 845 - protein, 117 aa, Zika virus; identical to SEQ ID NO: 635

SEQ ID NO: 846 - protein, 117 aa, Zika virus; identical to SEQ ID NO: 635

SEQ ID NO: 847 - protein, 117 aa, Zika virus; identical to SEQ ID NO: 635

SEQ ID NO: 848 - protein, 117 aa, Zika virus; identical to SEQ ID NO: 635

SEQ ID NO: 849 - protein, 117 aa, Zika virus; identical to SEQ ID NO: 635

SEQ ID NO: 850 - protein, 117 aa, Zika virus; identical to SEQ ID NO: 635

SEQ ID NO: 851 - protein, 117 aa, Zika virus; identical to SEQ ID NO: 635

SEQ ID NO: 852 - protein, 117 aa, Zika virus
KKSGGFRIVNMLKRGVARVNPLGGLKRLPAGLLLGHGPIRMVLAILAFLRFTAIKPSLGLINRWGSVGKKEAMEIIKKFKKDLAAMLRIINARKERKRRGADTSIGIVGLLLTTAMA

SEQ ID NO: 853 - protein, 117 aa, Zika virus; identical to SEQ ID NO: 852

SEQ ID NO: 854 - protein, 117 aa, Zika virus; identical to SEQ ID NO: 669

SEQ ID NO: 855 - protein, 117 aa, Zika virus; identical to SEQ ID NO: 767

SEQ ID NO: 856 - protein, 104 aa, Zika virus; identical to SEQ ID NO: 636

SEQ ID NO: 857 - protein, 117 aa, Zika virus; identical to SEQ ID NO: 635

SEQ ID NO: 858 - protein, 104 aa, Zika virus
MKNPKKKSGGFRIVNMLKRGAARVSPFGGLKRLPAGLLLGHGPIRMVLAILAFLRFTAIKPSLGLINRWGSVGKKEAMEIIKKFKKDLAAMLRIINARKEKKRR

SEQ ID NO: 859 - protein, 117 aa, Zika virus
KKSGGFRIVNMLKRGAARVSPFGGLKRLPAGLLLGHGPIRMVLAILAFLRFTAIKPSLGLINRWGSVGKKEAMEIIKKFKKDLAAMLRIINARKEKKRRGADTSVGIVGLLLTTAMA

SEQ ID NO: 860 - protein, 104 aa, Zika virus; identical to SEQ ID NO: 636

SEQ ID NO: 861 - protein, 117 aa, Zika virus; identical to SEQ ID NO: 635

SEQ ID NO: 862 - protein, 104 aa, Zika virus
MKNPKKKSGGFRIVNMLKRGVARVNPLGGLKRLPAGLLLGHGPIRMVLAILAFLRFTAIKPSLGLINRWGSVGKKEAMEIIKKFKKDLAAMLRIINARKERKRR

SEQ ID NO: 863 - protein, 117 aa, Zika virus; identical to SEQ ID NO: 824

SEQ ID NO: 864 - protein, 104 aa, Zika virus; identical to SEQ ID NO: 862

SEQ ID NO: 865 - protein, 117 aa, Zika virus; identical to SEQ ID NO: 824

SEQ ID NO: 866 - protein, 104 aa, Zika virus; identical to SEQ ID NO: 862

SEQ ID NO: 867 - protein, 117 aa, Zika virus; identical to SEQ ID NO: 824

SEQ ID NO: 868 - protein, 104 aa, Zika virus; identical to SEQ ID NO: 862

SEQ ID NO: 869 - protein, 117 aa, Zika virus; identical to SEQ ID NO: 824

SEQ ID NO: 870 - protein, 104 aa, Zika virus; identical to SEQ ID NO: 862

SEQ ID NO: 871 - protein, 117 aa, Zika virus; identical to SEQ ID NO: 824

SEQ ID NO: 872 - protein, 104 aa, Zika virus; identical to SEQ ID NO: 862

SEQ ID NO: 873 - protein, 117 aa, Zika virus; identical to SEQ ID NO: 824

SEQ ID NO: 874 - protein, 104 aa, Zika virus; identical to SEQ ID NO: 862

SEQ ID NO: 875 - protein, 117 aa, Zika virus; identical to SEQ ID NO: 824

SEQ ID NO: 876 - protein, 104 aa, Zika virus; identical to SEQ ID NO: 862

SEQ ID NO: 877 - protein, 117 aa, Zika virus; identical to SEQ ID NO: 824

SEQ ID NO: 878 - protein, 104 aa, Zika virus; identical to SEQ ID NO: 862

SEQ ID NO: 879 - protein, 117 aa, Zika virus; identical to SEQ ID NO: 824

SEQ ID NO: 880 - protein, 104 aa, Zika virus; identical to SEQ ID NO: 862

SEQ ID NO: 881 - protein, 117 aa, Zika virus; identical to SEQ ID NO: 824

SEQ ID NO: 882 - protein, 104 aa, Zika virus; identical to SEQ ID NO: 862

SEQ ID NO: 883 - protein, 117 aa, Zika virus; identical to SEQ ID NO: 824

SEQ ID NO: 884 - protein, 104 aa, Zika virus; identical to SEQ ID NO: 862

SEQ ID NO: 885 - protein, 117 aa, Zika virus; identical to SEQ ID NO: 824

SEQ ID NO: 886 - protein, 104 aa, Zika virus; identical to SEQ ID NO: 862

SEQ ID NO: 887 - protein, 117 aa, Zika virus; identical to SEQ ID NO: 824

SEQ ID NO: 888 - protein, 104 aa, Zika virus; identical to SEQ ID NO: 862

SEQ ID NO: 889 - protein, 117 aa, Zika virus; identical to SEQ ID NO: 824

SEQ ID NO: 890 - protein, 104 aa, Zika virus; identical to SEQ ID NO: 862

SEQ ID NO: 891 - protein, 117 aa, Zika virus; identical to SEQ ID NO: 824

SEQ ID NO: 892 - protein, 104 aa, Zika virus; identical to SEQ ID NO: 862

SEQ ID NO: 893 - protein, 117 aa, Zika virus; identical to SEQ ID NO: 824

SEQ ID NO: 894 - protein, 117 aa, Zika virus; identical to SEQ ID NO: 669

SEQ ID NO: 895 - protein, 104 aa, Zika virus; identical to SEQ ID NO: 862

SEQ ID NO: 896 - protein, 117 aa, Zika virus; identical to SEQ ID NO: 824

SEQ ID NO: 897 - protein, 104 aa, Zika virus; identical to SEQ ID NO: 862

SEQ ID NO: 898 - protein, 117 aa, Zika virus; identical to SEQ ID NO: 824

SEQ ID NO: 899 - protein, 104 aa, Zika virus; identical to SEQ ID NO: 862

SEQ ID NO: 900 - protein, 117 aa, Zika virus; identical to SEQ ID NO: 824

SEQ ID NO: 901 - protein, 104 aa, Zika virus; identical to SEQ ID NO: 862

SEQ ID NO: 902 - protein, 117 aa, Zika virus; identical to SEQ ID NO: 824

SEQ ID NO: 903 - protein, 104 aa, Zika virus; identical to SEQ ID NO: 862

SEQ ID NO: 904 - protein, 117 aa, Zika virus; identical to SEQ ID NO: 824

SEQ ID NO: 905 - protein, 104 aa, Zika virus; identical to SEQ ID NO: 862

SEQ ID NO: 906 - protein, 117 aa, Zika virus; identical to SEQ ID NO: 824

SEQ ID NO: 907 - protein, 104 aa, Zika virus; identical to SEQ ID NO: 862

SEQ ID NO: 908 - protein, 117 aa, Zika virus; identical to SEQ ID NO: 824

SEQ ID NO: 909 - protein, 104 aa, Zika virus; identical to SEQ ID NO: 862

SEQ ID NO: 910 - protein, 117 aa, Zika virus; identical to SEQ ID NO: 824

SEQ ID NO: 911 - protein, 104 aa, Zika virus; identical to SEQ ID NO: 862

SEQ ID NO: 912 - protein, 117 aa, Zika virus; identical to SEQ ID NO: 824

SEQ ID NO: 913 - protein, 104 aa, Zika virus; identical to SEQ ID NO: 862

SEQ ID NO: 914 - protein, 117 aa, Zika virus; identical to SEQ ID NO: 824

SEQ ID NO: 915 - protein, 104 aa, Zika virus; identical to SEQ ID NO: 862

SEQ ID NO: 916 - protein, 117 aa, Zika virus; identical to SEQ ID NO: 824

SEQ ID NO: 917 - protein, 104 aa, Zika virus; identical to SEQ ID NO: 862

SEQ ID NO: 918 - protein, 117 aa, Zika virus; identical to SEQ ID NO: 824

SEQ ID NO: 919 - protein, 104 aa, Zika virus; identical to SEQ ID NO: 862

SEQ ID NO: 920 - protein, 117 aa, Zika virus; identical to SEQ ID NO: 824

SEQ ID NO: 921 - protein, 104 aa, Zika virus; identical to SEQ ID NO: 862

SEQ ID NO: 922 - protein, 117 aa, Zika virus; identical to SEQ ID NO: 824

SEQ ID NO: 923 - protein, 104 aa, Zika virus; identical to SEQ ID NO: 862

SEQ ID NO: 924 - protein, 117 aa, Zika virus; identical to SEQ ID NO: 824

SEQ ID NO: 925 - protein, 104 aa, Zika virus; identical to SEQ ID NO: 862

SEQ ID NO: 926 - protein, 117 aa, Zika virus; identical to SEQ ID NO: 824

SEQ ID NO: 927 - protein, 104 aa, Zika virus; identical to SEQ ID NO: 862

SEQ ID NO: 928 - protein, 117 aa, Zika virus; identical to SEQ ID NO: 824

SEQ ID NO: 929 - protein, 104 aa, Zika virus; identical to SEQ ID NO: 862

SEQ ID NO: 930 - protein, 117 aa, Zika virus; identical to SEQ ID NO: 824

SEQ ID NO: 931 - protein, 104 aa, Zika virus; identical to SEQ ID NO: 862

SEQ ID NO: 932 - protein, 117 aa, Zika virus; identical to SEQ ID NO: 824

SEQ ID NO: 933 - protein, 104 aa, Zika virus; identical to SEQ ID NO: 862

SEQ ID NO: 934 - protein, 117 aa, Zika virus; identical to SEQ ID NO: 824

SEQ ID NO: 935 - protein, 104 aa, Zika virus; identical to SEQ ID NO: 862

SEQ ID NO: 936 - protein, 117 aa, Zika virus; identical to SEQ ID NO: 824

SEQ ID NO: 937 - protein, 104 aa, Zika virus; identical to SEQ ID NO: 862

SEQ ID NO: 938 - protein, 117 aa, Zika virus; identical to SEQ ID NO: 824

SEQ ID NO: 939 - protein, 104 aa, Zika virus; identical to SEQ ID NO: 862

SEQ ID NO: 940 - protein, 117 aa, Zika virus; identical to SEQ ID NO: 824

SEQ ID NO: 941 - protein, 104 aa, Zika virus; identical to SEQ ID NO: 862

SEQ ID NO: 942 - protein, 117 aa, Zika virus; identical to SEQ ID NO: 824

SEQ ID NO: 943 - protein, 104 aa, Zika virus; identical to SEQ ID NO: 862

SEQ ID NO: 944 - protein, 117 aa, Zika virus; identical to SEQ ID NO: 824

SEQ ID NO: 945 - protein, 104 aa, Zika virus; identical to SEQ ID NO: 862

SEQ ID NO: 946 - protein, 117 aa, Zika virus; identical to SEQ ID NO: 824

SEQ ID NO: 947 - protein, 104 aa, Zika virus; identical to SEQ ID NO: 862

SEQ ID NO: 948 - protein, 117 aa, Zika virus; identical to SEQ ID NO: 824

SEQ ID NO: 949 - protein, 104 aa, Zika virus; identical to SEQ ID NO: 862

SEQ ID NO: 950 - protein, 117 aa, Zika virus; identical to SEQ ID NO: 824

SEQ ID NO: 951 - protein, 104 aa, Zika virus; identical to SEQ ID NO: 862

SEQ ID NO: 952 - protein, 117 aa, Zika virus; identical to SEQ ID NO: 824

SEQ ID NO: 953 - protein, 104 aa, Zika virus; identical to SEQ ID NO: 862

SEQ ID NO: 954 - protein, 117 aa, Zika virus; identical to SEQ ID NO: 824

SEQ ID NO: 955 - protein, 104 aa, Zika virus; identical to SEQ ID NO: 862

SEQ ID NO: 956 - protein, 117 aa, Zika virus; identical to SEQ ID NO: 824

SEQ ID NO: 957 - protein, 104 aa, Zika virus; identical to SEQ ID NO: 862

SEQ ID NO: 958 - protein, 117 aa, Zika virus; identical to SEQ ID NO: 824

SEQ ID NO: 959 - protein, 104 aa, Zika virus; identical to SEQ ID NO: 862

SEQ ID NO: 960 - protein, 117 aa, Zika virus; identical to SEQ ID NO: 824

SEQ ID NO: 961 - protein, 104 aa, Zika virus; identical to SEQ ID NO: 862

SEQ ID NO: 962 - protein, 117 aa, Zika virus; identical to SEQ ID NO: 824

SEQ ID NO: 963 - protein, 104 aa, Zika virus; identical to SEQ ID NO: 862

SEQ ID NO: 964 - protein, 117 aa, Zika virus; identical to SEQ ID NO: 824

SEQ ID NO: 965 - protein, 104 aa, Zika virus; identical to SEQ ID NO: 862

SEQ ID NO: 966 - protein, 117 aa, Zika virus; identical to SEQ ID NO: 824

SEQ ID NO: 967 - protein, 104 aa, Zika virus; identical to SEQ ID NO: 862

SEQ ID NO: 968 - protein, 117 aa, Zika virus; identical to SEQ ID NO: 824

SEQ ID NO: 969 - protein, 104 aa, Zika virus; identical to SEQ ID NO: 862

SEQ ID NO: 970 - protein, 117 aa, Zika virus; identical to SEQ ID NO: 824

SEQ ID NO: 971 - protein, 104 aa, Zika virus; identical to SEQ ID NO: 862

SEQ ID NO: 972 - protein, 117 aa, Zika virus; identical to SEQ ID NO: 824

SEQ ID NO: 973 - protein, 104 aa, Zika virus; identical to SEQ ID NO: 862

SEQ ID NO: 974 - protein, 117 aa, Zika virus; identical to SEQ ID NO: 824

SEQ ID NO: 975 - protein, 104 aa, Zika virus; identical to SEQ ID NO: 862

SEQ ID NO: 976 - protein, 117 aa, Zika virus; identical to SEQ ID NO: 824

SEQ ID NO: 977 - protein, 104 aa, Zika virus; identical to SEQ ID NO: 862

SEQ ID NO: 978 - protein, 117 aa, Zika virus; identical to SEQ ID NO: 824

SEQ ID NO: 979 - protein, 104 aa, Zika virus; identical to SEQ ID NO: 862

SEQ ID NO: 980 - protein, 117 aa, Zika virus; identical to SEQ ID NO: 824

SEQ ID NO: 981 - protein, 104 aa, Zika virus; identical to SEQ ID NO: 862

SEQ ID NO: 982 - protein, 117 aa, Zika virus; identical to SEQ ID NO: 824

SEQ ID NO: 983 - protein, 104 aa, Zika virus; identical to SEQ ID NO: 862

SEQ ID NO: 984 - protein, 117 aa, Zika virus; identical to SEQ ID NO: 824

SEQ ID NO: 985 - protein, 104 aa, Zika virus; identical to SEQ ID NO: 862

SEQ ID NO: 986 - protein, 117 aa, Zika virus; identical to SEQ ID NO: 824

SEQ ID NO: 987 - protein, 104 aa, Zika virus; identical to SEQ ID NO: 862

SEQ ID NO: 988 - protein, 117 aa, Zika virus; identical to SEQ ID NO: 824

SEQ ID NO: 989 - protein, 104 aa, Zika virus; identical to SEQ ID NO: 862

SEQ ID NO: 990 - protein, 117 aa, Zika virus; identical to SEQ ID NO: 824

SEQ ID NO: 991 - protein, 104 aa, Zika virus; identical to SEQ ID NO: 862

SEQ ID NO: 992 - protein, 117 aa, Zika virus; identical to SEQ ID NO: 824

SEQ ID NO: 993 - protein, 104 aa, Zika virus; identical to SEQ ID NO: 862

SEQ ID NO: 994 - protein, 117 aa, Zika virus; identical to SEQ ID NO: 824

SEQ ID NO: 995 - protein, 104 aa, Zika virus; identical to SEQ ID NO: 862

SEQ ID NO: 996 - protein, 117 aa, Zika virus; identical to SEQ ID NO: 824

SEQ ID NO: 997 - protein, 104 aa, Zika virus; identical to SEQ ID NO: 862

SEQ ID NO: 998 - protein, 117 aa, Zika virus; identical to SEQ ID NO: 824

SEQ ID NO: 999 - protein, 104 aa, Zika virus; identical to SEQ ID NO: 862

SEQ ID NO: 1000 - protein, 117 aa, Zika virus; identical to SEQ ID NO: 824

SEQ ID NO: 1001 - protein, 104 aa, Zika virus; identical to SEQ ID NO: 862

SEQ ID NO: 1002 - protein, 117 aa, Zika virus; identical to SEQ ID NO: 824

SEQ ID NO: 1003 - protein, 104 aa, Zika virus; identical to SEQ ID NO: 862

SEQ ID NO: 1004 - protein, 117 aa, Zika virus; identical to SEQ ID NO: 824

SEQ ID NO: 1005 - protein, 104 aa, Zika virus; identical to SEQ ID NO: 862

SEQ ID NO: 1006 - protein, 117 aa, Zika virus; identical to SEQ ID NO: 824

SEQ ID NO: 1007 - protein, 104 aa, Zika virus; identical to SEQ ID NO: 862

SEQ ID NO: 1008 - protein, 117 aa, Zika virus; identical to SEQ ID NO: 824

SEQ ID NO: 1009 - protein, 104 aa, Zika virus; identical to SEQ ID NO: 862

SEQ ID NO: 1010 - protein, 117 aa, Zika virus; identical to SEQ ID NO: 824

SEQ ID NO: 1011 - protein, 104 aa, Zika virus; identical to SEQ ID NO: 862

SEQ ID NO: 1012 - protein, 117 aa, Zika virus; identical to SEQ ID NO: 824

SEQ ID NO: 1013 - protein, 104 aa, Zika virus; identical to SEQ ID NO: 862

SEQ ID NO: 1014 - protein, 117 aa, Zika virus; identical to SEQ ID NO: 824

SEQ ID NO: 1015 - protein, 104 aa, Zika virus; identical to SEQ ID NO: 862

SEQ ID NO: 1016 - protein, 117 aa, Zika virus; identical to SEQ ID NO: 824

SEQ ID NO: 1017 - protein, 104 aa, Zika virus; identical to SEQ ID NO: 862

SEQ ID NO: 1018 - protein, 117 aa, Zika virus; identical to SEQ ID NO: 824

SEQ ID NO: 1019 - protein, 104 aa, Zika virus; identical to SEQ ID NO: 862

SEQ ID NO: 1020 - protein, 117 aa, Zika virus; identical to SEQ ID NO: 824

SEQ ID NO: 1021 - protein, 104 aa, Zika virus; identical to SEQ ID NO: 862

SEQ ID NO: 1022 - protein, 117 aa, Zika virus; identical to SEQ ID NO: 824

SEQ ID NO: 1023 - protein, 117 aa, Zika virus; identical to SEQ ID NO: 635

SEQ ID NO: 1024 - protein, 117 aa, Zika virus; identical to SEQ ID NO: 635

SEQ ID NO: 1025 - protein, 117 aa, Zika virus
KKSGGFRIVNMLKRGVARVSPFGGLKRLPAGLLLGHGPIRMVLAILAFLRFTAIKPSLGLINRWGSVGKKEAMEIIKKFKKDLAAMLRIINARKEKKRRGADTNVGIVGLLLTTAMA

SEQ ID NO: 1026 - protein, 117 aa, Zika virus; identical to SEQ ID NO: 1025

SEQ ID NO: 1027 - protein, 117 aa, Zika virus; identical to SEQ ID NO: 635

SEQ ID NO: 1028 - protein, 117 aa, Zika virus; identical to SEQ ID NO: 635

SEQ ID NO: 1029 - protein, 117 aa, Zika virus; identical to SEQ ID NO: 635

SEQ ID NO: 1030 - protein, 117 aa, Zika virus; identical to SEQ ID NO: 635

SEQ ID NO: 1031 - protein, 133 aa, Zika virus
MKNPKKKSGGFRIVNMLKRGVARVSPFGGLKRLPAGLLLGHGPIRMVLAILAFLRFTAIKPSLGLINRWGSVGKKEAMEIIKKFKKDLAAMLRIINARKEKKRRGADTSVGIVGLLLTTAMAAEVTRRGSAYY

SEQ ID NO: 1032 - protein, 117 aa, Zika virus; identical to SEQ ID NO: 635

SEQ ID NO: 1033 - protein, 117 aa, Zika virus; identical to SEQ ID NO: 635

SEQ ID NO: 1034 - protein, 117 aa, Zika virus; identical to SEQ ID NO: 635

SEQ ID NO: 1035 - protein, 117 aa, Zika virus; identical to SEQ ID NO: 635

SEQ ID NO: 1036 - protein, 117 aa, Zika virus; identical to SEQ ID NO: 635

SEQ ID NO: 1037 - protein, 117 aa, Zika virus; identical to SEQ ID NO: 635

SEQ ID NO: 1038 - protein, 117 aa, Zika virus; identical to SEQ ID NO: 635

SEQ ID NO: 1039 - protein, 117 aa, Zika virus; identical to SEQ ID NO: 657

SEQ ID NO: 1040 - protein, 122 aa, Zika virus
MKNPKKKSGGFRIVNMLKRGVARVNPLGGLKRLPAGLLLGHGPIRMVLAILAFLRFTAIKPSLGLINRWGSVGKKEAMEIIKKFKKDLAAMLRIINARKERKRRGADTSIGIIGLLLTTAMA

SEQ ID NO: 1041 - protein, 117 aa, Zika virus; identical to SEQ ID NO: 824

SEQ ID NO: 1042 - protein, 117 aa, Zika virus
KKSGGFRIVNMLKRGAARVSPFGGLKRLPAGLLLGHGPIRMVLAILAFLRFTAIKPSLGLINRWGSVGKKEAMEIIKKFKKDLAAMLRIINARKEKKRRGTDTSVGIVGLLLTTAMA

SEQ ID NO: 1043 - protein, 117 aa, Zika virus; identical to SEQ ID NO: 669

SEQ ID NO: 1044 - protein, 117 aa, Zika virus; identical to SEQ ID NO: 669

SEQ ID NO: 1045 - protein, 104 aa, Zika virus; identical to SEQ ID NO: 636

SEQ ID NO: 1046 - protein, 117 aa, Zika virus; identical to SEQ ID NO: 635

SEQ ID NO: 1047 - protein, 104 aa, Zika virus; identical to SEQ ID NO: 636

SEQ ID NO: 1048 - protein, 117 aa, Zika virus; identical to SEQ ID NO: 635

SEQ ID NO: 1049 - protein, 104 aa, Zika virus; identical to SEQ ID NO: 636

SEQ ID NO: 1050 - protein, 117 aa, Zika virus; identical to SEQ ID NO: 635

SEQ ID NO: 1051 - protein, 104 aa, Zika virus; identical to SEQ ID NO: 636

SEQ ID NO: 1052 - protein, 117 aa, Zika virus; identical to SEQ ID NO: 635

SEQ ID NO: 1053 - protein, 104 aa, Zika virus; identical to SEQ ID NO: 636

SEQ ID NO: 1054 - protein, 117 aa, Zika virus; identical to SEQ ID NO: 635

SEQ ID NO: 1055 - protein, 104 aa, Zika virus; identical to SEQ ID NO: 636

SEQ ID NO: 1056 - protein, 117 aa, Zika virus; identical to SEQ ID NO: 635

SEQ ID NO: 1057 - protein, 104 aa, Zika virus; identical to SEQ ID NO: 636

SEQ ID NO: 1058 - protein, 117 aa, Zika virus; identical to SEQ ID NO: 635

SEQ ID NO: 1059 - protein, 104 aa, Zika virus; identical to SEQ ID NO: 636

SEQ ID NO: 1060 - protein, 117 aa, Zika virus; identical to SEQ ID NO: 635

SEQ ID NO: 1061 - protein, 104 aa, Zika virus; identical to SEQ ID NO: 636

SEQ ID NO: 1062 - protein, 117 aa, Zika virus; identical to SEQ ID NO: 635

SEQ ID NO: 1063 - protein, 104 aa, Zika virus; identical to SEQ ID NO: 636

SEQ ID NO: 1064 - protein, 117 aa, Zika virus; identical to SEQ ID NO: 635

SEQ ID NO: 1065 - protein, 117 aa, Zika virus; identical to SEQ ID NO: 635

SEQ ID NO: 1066 - protein, 117 aa, Zika virus; identical to SEQ ID NO: 635

SEQ ID NO: 1067 - protein, 117 aa, Zika virus; identical to SEQ ID NO: 635

SEQ ID NO: 1068 - protein, 104 aa, Zika virus; identical to SEQ ID NO: 636

SEQ ID NO: 1069 - protein, 117 aa, Zika virus; identical to SEQ ID NO: 635

SEQ ID NO: 1070 - protein, 117 aa, Zika virus; identical to SEQ ID NO: 635

SEQ ID NO: 1071 - protein, 117 aa, Zika virus; identical to SEQ ID NO: 635

SEQ ID NO: 1072 - protein, 117 aa, Zika virus
KKSGGFRIVNMLKRGVARVSPFGGLKRLPAGLLLGHGPIRMVLAILAFLRFTAIKPSLGLINRWGSVGKKEAMEIIKKFKKDLAAMLRIINAGKEKKRRGADTNVGIVGLLLTTAMA

SEQ ID NO: 1073 - protein, 117 aa, Zika virus; identical to SEQ ID NO: 1025

SEQ ID NO: 1074 - protein, 122 aa, Zika virus; identical to SEQ ID NO: 3

SEQ ID NO: 1075 - protein, 104 aa, Zika virus; identical to SEQ ID NO: 636

SEQ ID NO: 1076 - protein, 117 aa, Zika virus; identical to SEQ ID NO: 635

SEQ ID NO: 1077 - protein, 117 aa, Zika virus; identical to SEQ ID NO: 635

SEQ ID NO: 1078 - protein, 117 aa, Zika virus; identical to SEQ ID NO: 635

SEQ ID NO: 1079 - protein, 117 aa, Zika virus; identical to SEQ ID NO: 635

SEQ ID NO: 1080 - protein, 117 aa, Zika virus; identical to SEQ ID NO: 635

SEQ ID NO: 1081 - protein, 117 aa, Zika virus; identical to SEQ ID NO: 635

SEQ ID NO: 1082 - protein, 117 aa, Zika virus; identical to SEQ ID NO: 635

SEQ ID NO: 1083 - protein, 117 aa, Zika virus; identical to SEQ ID NO: 824

SEQ ID NO: 1084 - protein, 117 aa, Zika virus; identical to SEQ ID NO: 635

SEQ ID NO: 1085 - protein, 117 aa, Zika virus; identical to SEQ ID NO: 635

SEQ ID NO: 1086 - protein, 104 aa, Zika virus; identical to SEQ ID NO: 636

SEQ ID NO: 1087 - protein, 104 aa, Zika virus; identical to SEQ ID NO: 636

SEQ ID NO: 1088 - protein, 104 aa, Zika virus; identical to SEQ ID NO: 636

SEQ ID NO: 1089 - protein, 117 aa, Zika virus; identical to SEQ ID NO: 635

SEQ ID NO: 1090 - protein, 104 aa, Zika virus; identical to SEQ ID NO: 862

SEQ ID NO: 1091 - protein, 117 aa, Zika virus; identical to SEQ ID NO: 852

SEQ ID NO: 1092 - protein, 104 aa, Zika virus; identical to SEQ ID NO: 636

SEQ ID NO: 1093 - protein, 104 aa, Zika virus; identical to SEQ ID NO: 766

SEQ ID NO: 1094 - protein, 117 aa, Zika virus; identical to SEQ ID NO: 767

SEQ ID NO: 1095 - protein, 104 aa, Zika virus; identical to SEQ ID NO: 862

SEQ ID NO: 1096 - protein, 117 aa, Zika virus; identical to SEQ ID NO: 824

SEQ ID NO: 1097 - protein, 117 aa, Zika virus; identical to SEQ ID NO: 635

SEQ ID NO: 1098 - protein, 104 aa, Zika virus; identical to SEQ ID NO: 636

SEQ ID NO: 1099 - protein, 104 aa, Zika virus; identical to SEQ ID NO: 636

SEQ ID NO: 1100 - protein, 117 aa, Zika virus; identical to SEQ ID NO: 767

SEQ ID NO: 1101 - protein, 117 aa, Zika virus; identical to SEQ ID NO: 635

SEQ ID NO: 1102 - protein, 117 aa, Zika virus; identical to SEQ ID NO: 635

SEQ ID NO: 1103 - protein, 117 aa, Zika virus; identical to SEQ ID NO: 1025

SEQ ID NO: 1104 - protein, 122 aa, Zika virus; identical to SEQ ID NO: 3

SEQ ID NO: 1105 - protein, 104 aa, Zika virus; identical to SEQ ID NO: 862

SEQ ID NO: 1106 - protein, 104 aa, Zika virus; identical to SEQ ID NO: 636

SEQ ID NO: 1107 - protein, 117 aa, Zika virus; identical to SEQ ID NO: 657

SEQ ID NO: 1108 - protein, 104 aa, Zika virus; identical to SEQ ID NO: 636

SEQ ID NO: 1109 - protein, 117 aa, Zika virus; identical to SEQ ID NO: 657

SEQ ID NO: 1110 - protein, 104 aa, Zika virus; identical to SEQ ID NO: 636

SEQ ID NO: 1111 - protein, 117 aa, Zika virus; identical to SEQ ID NO: 657

SEQ ID NO: 1112 - protein, 104 aa, Zika virus; identical to SEQ ID NO: 636

SEQ ID NO: 1113 - protein, 117 aa, Zika virus; identical to SEQ ID NO: 1025

SEQ ID NO: 1114 - protein, 117 aa, Zika virus; identical to SEQ ID NO: 635

SEQ ID NO: 1115 - protein, 117 aa, Zika virus; identical to SEQ ID NO: 852

SEQ ID NO: 1116 - protein, 117 aa, Zika virus; identical to SEQ ID NO: 852

SEQ ID NO: 1117 - protein, 117 aa, Zika virus; identical to SEQ ID NO: 669

SEQ ID NO: 1118 - protein, 117 aa, Zika virus; identical to SEQ ID NO: 824

SEQ ID NO: 1119 - protein, 117 aa, Zika virus; identical to SEQ ID NO: 852

SEQ ID NO: 1120 - protein, 117 aa, Zika virus; identical to SEQ ID NO: 635

SEQ ID NO: 1121 - protein, 122 aa, Zika virus; identical to SEQ ID NO: 3

SEQ ID NO: 1122 - protein, 104 aa, Zika virus; identical to SEQ ID NO: 636

SEQ ID NO: 1123 - protein, 117 aa, Zika virus; identical to SEQ ID NO: 635

SEQ ID NO: 1124 - protein, 122 aa, Zika virus; identical to SEQ ID NO: 3

SEQ ID NO: 1125 - protein, 104 aa, Zika virus; identical to SEQ ID NO: 636

SEQ ID NO: 1126 - protein, 117 aa, Zika virus; identical to SEQ ID NO: 635

SEQ ID NO: 1127 - protein, 122 aa, Zika virus; identical to SEQ ID NO: 655

SEQ ID NO: 1128 - protein, 117 aa, Zika virus; identical to SEQ ID NO: 657

SEQ ID NO: 1129 - protein, 122 aa, Zika virus; identical to SEQ ID NO: 655

SEQ ID NO: 1130 - protein, 117 aa, Zika virus; identical to SEQ ID NO: 657

SEQ ID NO: 1131 - protein, 117 aa, Zika virus; identical to SEQ ID NO: 635

SEQ ID NO: 1132 - protein, 117 aa, Zika virus; identical to SEQ ID NO: 635

SEQ ID NO: 1133 - protein, 117 aa, Zika virus; identical to SEQ ID NO: 1025

SEQ ID NO: 1134 - protein, 117 aa, Zika virus
KKSGGFRIVNMLKRGVARVSPFGGLKRLPAGLLLGHGPIRMVLAILAFLRFTAIKPSLGLINRWGSVGKKDAMEIIKKFKKDLAAMLRIINARKEKKRRGADTSVGIVGLLLTTAMA

SEQ ID NO: 1135 - protein, 117 aa, Zika virus; identical to SEQ ID NO: 635

SEQ ID NO: 1136 - protein, 117 aa, Zika virus; identical to SEQ ID NO: 635

SEQ ID NO: 1137 - protein, 117 aa, Zika virus; identical to SEQ ID NO: 635

SEQ ID NO: 1138 - protein, 117 aa, Zika virus; identical to SEQ ID NO: 669

SEQ ID NO: 1139 - protein, 117 aa, Zika virus; identical to SEQ ID NO: 635

SEQ ID NO: 1140 - protein, 117 aa, Zika virus; identical to SEQ ID NO: 635

SEQ ID NO: 1141 - protein, 117 aa, Zika virus; identical to SEQ ID NO: 767

SEQ ID NO: 1142 - protein, 125 aa, Zika virus
MKNPKKKSGGFRIVNMLKRGVARVSPFGGLKRLPAGLLLGHGPIRMVLAILAFLRFTAIKPSLGLINRWGSVGKKEAMEIIKKFKKDLAAMLRIINARKEKKRRGADTSVGIVGLLLTTAMAAEV

SEQ ID NO: 1143 - protein, 117 aa, Zika virus; identical to SEQ ID NO: 635

SEQ ID NO: 1144 - protein, 117 aa, Zika virus; identical to SEQ ID NO: 824

SEQ ID NO: 1145 - protein, 117 aa, Zika virus; identical to SEQ ID NO: 635

SEQ ID NO: 1146 - protein, 111 aa, Zika virus; identical to SEQ ID NO: 644

SEQ ID NO: 1147 - protein, 504 aa, Zika virus; identical to SEQ ID NO: 5

SEQ ID NO: 1148 - protein, 93 aa, Zika virus
AFTFTKIPAETLHGTVTVEVQYAGTDGPCKVPAQMAVDMQTLTPVGRLITANPVITESTENSKMMLELDPPFGDSYIVIGVGEKKITHHWHRS

SEQ ID NO: 1149 - protein, 97 aa, Zika virus
GKAFEATVRGAKRMAVLGDTAWDFGSVGGALNSLGKGIHQIFGAAFKSLFGGMSWFSQILIGTLLMWLGLNTKNGSISLMCLALGGVLIFLSTAVSA

SEQ ID NO: 1150 - protein, 504 aa, Zika virus; identical to SEQ ID NO: 5

SEQ ID NO: 1151 - protein, 301 aa, Zika virus
RCIGVSNRDFVEGMSGGTWVDVVLEHGGCVTVMAQDKPTVDIELVTTTVSNMAEVRSYCYEASISDMASDSRCPTQGEAYLDKQSDTQYVCKRTLVDRGWGNGCGLFGKGSLVTCAKFACSKKMTGKSIQPENLEYRIMLSVHGSQHSGMIVNDTGHETDENRAKVEITPNSPRAEATLGGFGSLGLDCEPRTGLDFSDLYYLTMNNKHWLVHKEWFHDIPLPWHAGADTGTPHWNNKEALVEFKDAHAKRQTVVVLGSQEGAVHTALAGALEAEMDGAKGRLSSGHLKCRLKMDKLRLKG

SEQ ID NO: 1152 - protein, 93 aa, Zika virus; identical to SEQ ID NO: 1148

SEQ ID NO: 1153 - protein, 97 aa, Zika virus; identical to SEQ ID NO: 1149

SEQ ID NO: 1154 - protein, 500 aa, Zika virus
IRCIGVSNRDFVEGMSGGTWVDVVLEHGGCVTVMAQDKPTVDIELVTTTVSNMAEVRSYCYEASISDMASDSRCPTQGEAYLDKQSDTQYVCKRTLVDRGWGNGCGLFGKGSLVTCAKFTCSKKMTGKSIQPENLEYRIMLSVHGSQHSGMIGYETDEDRAKVEVTPNSPRAEATLGGFGSLGLDCEPRTGLDFSDLYYLTMNNKHWLVHKEWFHDIPLPWHAGADTGTPHWNNKEALVEFKDAHAKRQTVVVLGSQEGAVHTALAGALEAEMDGAKGRLFSGHLKCRLKMDKLRLKGVSYSLCTAAFTFTKVPAETLHGTVTVEVQYAGTDGPCKIPVQMAVDMQTLTPVGRLITANPVITESTENSKMMLELDPPFGDSYIVIGVGDKKITHHWHRSGSTIGKAFEATVRGAKRMAVLGDTAWDFGSVGGVFNSLGKGIHQIFGAAFKSLFGGMSWFSQILIGTLLVWLGLNTKNGSISLTCLALGGVMIFLSTAVSA

SEQ ID NO: 1155 - protein, 93 aa, Zika virus
AFTFTKVPAETLHGTVTVEVQYAGTDGPCKIPVQMAVDMQTLTPVGRLITANPVITESTENSKMMLELDPPFGDSYIVIGVGDKKITHHWHRS

SEQ ID NO: 1156 - protein, 97 aa, Zika virus
GKAFEATVRGAKRMAVLGDTAWDFGSVGGVFNSLGKGIHQIFGAAFKSLFGGMSWFSQILIGTLLVWLGLNTKNGSISLTCLALGGVMIFLSTAVSA

SEQ ID NO: 1157 - protein, 500 aa, Zika virus; identical to SEQ ID NO: 1154

SEQ ID NO: 1158 - protein, 93 aa, Zika virus; identical to SEQ ID NO: 1155

SEQ ID NO: 1159 - protein, 97 aa, Zika virus; identical to SEQ ID NO: 1156

SEQ ID NO: 1160 - protein, 504 aa, Zika virus; identical to SEQ ID NO: 5

SEQ ID NO: 1161 - protein, 93 aa, Zika virus; identical to SEQ ID NO: 1148

SEQ ID NO: 1162 - protein, 97 aa, Zika virus; identical to SEQ ID NO: 1149

SEQ ID NO: 1163 - protein, 504 aa, Zika virus; identical to SEQ ID NO: 5

SEQ ID NO: 1164 - protein, 93 aa, Zika virus; identical to SEQ ID NO: 1148

SEQ ID NO: 1165 - protein, 97 aa, Zika virus; identical to SEQ ID NO: 1149

SEQ ID NO: 1166 - protein, 504 aa, Zika virus; identical to SEQ ID NO: 5

SEQ ID NO: 1167 - protein, 504 aa, Zika virus; identical to SEQ ID NO: 5

SEQ ID NO: 1168 - protein, 93 aa, Zika virus; identical to SEQ ID NO: 1148

SEQ ID NO: 1169 - protein, 97 aa, Zika virus; identical to SEQ ID NO: 1149

SEQ ID NO: 1170 - protein, 500 aa, Zika virus
IRCIGVSNRDFVEGMSGGTWVDVVLEHGGCVTVMAQDKPTVDIELVTTTVSNMAEVRSYCYEASISDMASDSRCPTQGEAYLDKQSDTQYVCKRTLVDRGWGNGCGLFGKGSLVTCAKFACSKKMTGKSIQPENLEYRIMLSVHGSQHSGMIGHETDENRAKVEITPNSPRAEATLGGFGSLGLDCEPRTGLDFSDLYYLTMNNKHWLVHKEWFHDIPLPWHAGADTGTPHWNNKEALVEFKDAHAKRQTVVVLGSQEGAVHTALAGALEAEMDGAKGRLSSGHLKCRLKMDKLRLKGVSYSLCTAAFTFTKIPAETLHGTVTVEVQYSGTDGPCKVPAQMAVDMQTLTPVGRLITANPVITESAENSKMMLELDPPFGDSYIVIGVGDKKITHHWHRSGSTIGKAFEATVRGAKRMAVLGDTAWDFGSVGGALNSLGKGIHQIFGAAFKSLFGGMSWFSQILIGTLLVWLGLNTKNGSISLTCLALGGVLIFLSTAVSA

SEQ ID NO: 1171 - protein, 93 aa, Zika virus
AFTFTKIPAETLHGTVTVEVQYSGTDGPCKVPAQMAVDMQTLTPVGRLITANPVITESAENSKMMLELDPPFGDSYIVIGVGDKKITHHWHRS

SEQ ID NO: 1172 - protein, 97 aa, Zika virus
GKAFEATVRGAKRMAVLGDTAWDFGSVGGALNSLGKGIHQIFGAAFKSLFGGMSWFSQILIGTLLVWLGLNTKNGSISLTCLALGGVLIFLSTAVSA

SEQ ID NO: 1173 - protein, 504 aa, Zika virus
IRCIGVSNRDFVEGMSGGTWVDVVLEHGGCVTVMAQDKPTVDIELVTTTVSNMAEVRSYCYEASISDMASDSRCPTQGEAYLDKQSDTQYVCKRTLVDRGWGNGCGLFGKGSLVTCAKFACSKKMTGKSIQPENLEYRIMLSVHGSQHSGIIVNDTGHETDENRAKVEITPNSPRAEATLGGFGSLGLDCEPRTGLDFSDLYYLTMNNKHWLVHKEWFHDIPLPWHAGADTGTPHWNNKEALVEFKDAHAKRQTVVVLGSQEGAVHTALAGALEAEMDGAKGRLSSGHLKCRLKMDKLRLKGVSYSLCTAAFTFTKIPAETLHGTVTVEVQYAGTDGPCKVPAQMAVDMQTLTPVGRLITANPVITESTENSKMMLELDPPFGDSYIVIGVGEKKITHHWHRSGSTIGKAFEATVRGAKRMAVLGDTAWDFGSVGGALNSLGKGIHQIFGAAFKSLFGGMSWFSQILIGTLLMWLGLNTKNGSISLMCLALGGVLIFLSTAVSA

SEQ ID NO: 1174 - protein, 93 aa, Zika virus; identical to SEQ ID NO: 1148

SEQ ID NO: 1175 - protein, 97 aa, Zika virus; identical to SEQ ID NO: 1149

SEQ ID NO: 1176 - protein, 504 aa, Zika virus; identical to SEQ ID NO: 5

SEQ ID NO: 1177 - protein, 93 aa, Zika virus; identical to SEQ ID NO: 1148

SEQ ID NO: 1178 - protein, 97 aa, Zika virus; identical to SEQ ID NO: 1149

SEQ ID NO: 1179 - protein, 504 aa, Zika virus
IRCIGVSNRDFVEGMSGGTWVDVVLEHGGCVTVMAQDKPTVDIELVTTTVSNMAEVRSYCYEASISDMASDSRCPTQGEAYLDKQSDTQYVCKRTLVDRGWGNGCGLFGKGSLVTCAKFACSKKMTGKSIQPENLEYRIMLSVHGSQHSGMIVNDTGHETDENRAKVEITPNSPRAEATLGGFGSLGLDCEPRTGLDFSDLYYLTMNNKHWLVHKEWFHDIPLPWHAGADTGTPHWNNKEALVEFKDAHAKRQTVVVLGSQEGAVHTALAGALEAEMDGAKGRLSSGHLKCRLKMDKLRLKGVSYSLCTAAFTFTKIPAETLHGTVTVEVQYAGTDGPCKVPAQMAVDMQTLTPVGRLITANPVITESTENSKMMLELDPPFGDSYIVIGVGEKKITHHWHRSGSTIGKAFEATVRGAKRMAVLGDTAWDFGSVGGALNSLGKGIHQIFGAAFKSLFGGMSWFSQILIGTLLLWLGLNTKNGSISLMCLALGGVLIFLSTAVSA

SEQ ID NO: 1180 - protein, 93 aa, Zika virus; identical to SEQ ID NO: 1148

SEQ ID NO: 1181 - protein, 97 aa, Zika virus
GKAFEATVRGAKRMAVLGDTAWDFGSVGGALNSLGKGIHQIFGAAFKSLFGGMSWFSQILIGTLLLWLGLNTKNGSISLMCLALGGVLIFLSTAVSA

SEQ ID NO: 1182 - protein, 504 aa, Zika virus
IRCIGVSNRDFVEGMSGGTWVDVVLEHGGCVTVMAQDKPTVDIELVTTTVSNMAEVRSYCYEASISDMASESRCPTQGEAYLDKQSDTQYVCKRTLVDRGWGNGCGLFGKGSLVTCAKFACSKKMTGKSIQPENLEYRIMLSVHGSQHSGMIVNDTGHETDENRAKVEITPNSPRAEATLGGFGSLGLDCEPRTGLDFSDLYYLTMNNKHWLVHKEWFHDIPLPWHAGADTGTPHWNNKEALVEFKDAHAKRQTVVVLGSQEGAVHTALAGALEAEMDGAKGRLSSGHLKCRLKMDKLRLKGVSYSLCTAAFTFTKIPAETLHGTVTVEVQYAGTDGPCKVPAQMAVDMQTLTPVGRLITANPVITESTENSKMMLELDPPFGDSYIVIGVGEKKITHHWHRSGSTIGKAFEATVRGAKRMAVLGDTAWDFGSVGGALNSLGKGIHQIFGAAFKSLFGGMSWFSQILIGTLLMWLGLNTKNGSISLMCLALGGVLIFLSTAVSA

SEQ ID NO: 1183 - protein, 93 aa, Zika virus; identical to SEQ ID NO: 1148

SEQ ID NO: 1184 - protein, 97 aa, Zika virus; identical to SEQ ID NO: 1149

SEQ ID NO: 1185 - protein, 504 aa, Zika virus; identical to SEQ ID NO: 5

SEQ ID NO: 1186 - protein, 93 aa, Zika virus; identical to SEQ ID NO: 1148

SEQ ID NO: 1187 - protein, 97 aa, Zika virus; identical to SEQ ID NO: 1149

SEQ ID NO: 1188 - protein, 504 aa, Zika virus
IRCIGVSNRDFVEGMSGGTWVDVVLEHGGCVTVMAQDKPTVDIELVTTTVSNMAEVRSYCYEASISDMASDSRCPTQGEAYLDKQSDTQYVCKRTLVDRGWGNGCGLFGKGSLVTCAKFACSKKMTGKSIQPENLEYRIMLSVHGSQHSGMIVNDTGHETDENRAKVEITPISPRAEATLGGFGSLGLDCEPRTGLDFSDLYYLTMNNKHWLVHKEWFHDIPLPWHAGADTGTPHWNNKEALVEFKDAHAKRQTVVVLGSQEGAVHTALAGALEAEMDGAKGRLSSGHLKCRLKMDKLRLKGVSYSLCTAAFTFTKIPAETLHGTVTVEVQYAGTDGPCKVPAQMAVDMQTLTPVGRLITANPVITESTENSKMMLELDPPFGDSYIVIGVGEKKITHHWHRSGSTIGKAFEATVRGAKRMAVLGDTAWDFGSVGGALNSLGKGIHQIFGAAFKSLFGRMSWFSQILIGTLLMWLGLNTKNGSISLMCLALGGVLIFLSTAVSA

SEQ ID NO: 1189 - protein, 93 aa, Zika virus; identical to SEQ ID NO: 1148

SEQ ID NO: 1190 - protein, 97 aa, Zika virus
GKAFEATVRGAKRMAVLGDTAWDFGSVGGALNSLGKGIHQIFGAAFKSLFGRMSWFSQILIGTLLMWLGLNTKNGSISLMCLALGGVLIFLSTAVSA

SEQ ID NO: 1191 - protein, 504 aa, Zika virus; identical to SEQ ID NO: 5

SEQ ID NO: 1192 - protein, 93 aa, Zika virus; identical to SEQ ID NO: 1148

SEQ ID NO: 1193 - protein, 97 aa, Zika virus; identical to SEQ ID NO: 1149

SEQ ID NO: 1194 - protein, 504 aa, Zika virus
IRCIGVSNRDFVEGMSGGTWVDVVLEHGGCVTVMAQDKPTVDIELVTTTVSNMAEVRSYCYEASISDMASDSRCPTQGEAYLDKQSDTQYVCKRTLVDRGWGNGCGLFGKGSLVTCAKFACSKKMTGKSIQPENLEYRIMLSVHGSQHSGMIVNDTGHETDENRAKVEITPNSPRAEATLGGFGSLGLDCEPRTGLDFSDLYYLTMNNKHWLVHKEWFHDIPLPWHAGADTGTPHWNNKEALVEFKDAHAKRQTVVVLGSQEGAVHTALAGALEAEMDGAKGRLSSGHLKCRLKMDKLRLKGVSYSLCTAAFTFTKIPAETLHGTVTVEVQYAGTDGPCKVPAQMAVDMQTLTPVGRLITANPVITESTENSKMMLELDPPFGDSYIVIGIGEKKITHHWHRSGSTIGKAFEATVRGAKRMAVLGDTAWDFGSVGGALNSLGKGIHQIFGAAFKSLFGGMSWFSQILIGTLLMWLGLNTKNGSISLVCLALGGVLIFLSTAVSA

SEQ ID NO: 1195 - protein, 93 aa, Zika virus
AFTFTKIPAETLHGTVTVEVQYAGTDGPCKVPAQMAVDMQTLTPVGRLITANPVITESTENSKMMLELDPPFGDSYIVIGIGEKKITHHWHRS

SEQ ID NO: 1196 - protein, 97 aa, Zika virus
GKAFEATVRGAKRMAVLGDTAWDFGSVGGALNSLGKGIHQIFGAAFKSLFGGMSWFSQILIGTLLMWLGLNTKNGSISLVCLALGGVLIFLSTAVSA

SEQ ID NO: 1197 - protein, 504 aa, Zika virus; identical to SEQ ID NO: 5

SEQ ID NO: 1198 - protein, 93 aa, Zika virus; identical to SEQ ID NO: 1148

SEQ ID NO: 1199 - protein, 97 aa, Zika virus; identical to SEQ ID NO: 1149

SEQ ID NO: 1200 - protein, 504 aa, Zika virus
IRCIGVSNRDFVEGMSGGTWVDVVLEHGGCVTVMAQDKPTVDIELVTTTVSNMAEVRSYCYEASISDMASDSRCPTQGEAYLDKQSDTQYVCKRTLVDRGWGNGCGLFGKGSLVTCAKFACSKKMTGKSIQPENLEYRIMLSVHGSQHSGMIVNDTGHETDENRAKVEITPNSPRAEATLGGFGSLGLDCEPRTGLDFSDLYYLTMNNKHWLVHKEWFHDIPLPWHAGADTGTPHWNNKEALVEFKDAHAKRQTVVVLGSQEGAVHTALAGALEAEMDGAKGRLSSGHLKCRLKMDKLRLKGVSYSLCTAAFTFTKIPAETLHGTVTVEVQYAGTDGPCKVPAQMAVDMQTLTPVGRLITANPVITESTENSKMMLELDPPFGDSYIVIGVGEKKITHHWHRSGSTIGKAFEATVRGAKRMAVLGDTAWDFGSVGGALNSLGKGIHQIFGAAFKSLFGGMSWLSQILIGTLLMWLGLNTKNGSISLMCLALGGVLIFLSTAVSA

SEQ ID NO: 1201 - protein, 93 aa, Zika virus; identical to SEQ ID NO: 1148

SEQ ID NO: 1202 - protein, 97 aa, Zika virus
GKAFEATVRGAKRMAVLGDTAWDFGSVGGALNSLGKGIHQIFGAAFKSLFGGMSWLSQILIGTLLMWLGLNTKNGSISLMCLALGGVLIFLSTAVSA

SEQ ID NO: 1203 - protein, 504 aa, Zika virus; identical to SEQ ID NO: 5

SEQ ID NO: 1204 - protein, 93 aa, Zika virus; identical to SEQ ID NO: 1148

SEQ ID NO: 1205 - protein, 97 aa, Zika virus; identical to SEQ ID NO: 1149

SEQ ID NO: 1206 - protein, 504 aa, Zika virus
IRCIGVSNRDFVEGMSGGTWVDVVLEHGGCVTVMAQDKPTVDIELVTTTVSNMAEVRSYCYEASISDMASDSRCPTQGEAYLDKQSDTQYVCKRTLVDRGWGNGCGLFGKGSLVTCAKFACSKKMTGKSIQPENLEYRIMLSVHGSQHSGMIVNDTGHETDENRAKVEITPNSPRAEATLGGFGSLGLDCEPRTGLDFSDLYYLTMNNKHWLVHREWFHDIPLPWHAGADTGTPHWNNKEALVEFKDAHAKRQTVVVLGSQEGAVHTALAGALEAEMDGAKGRLSSGHLKCRLKMDKLRLKGVSYSLCTASFTFTKIPAETLHGTVTVEVQYAGTDGPCKVPAQMAVDMQTLTPVGRLITANPVITESTENSKMMLELDPPFGDSYIVIGVGEKKITHHWHRSGSTIGKAFEATVRGAKRMAVLGDTAWDFGSVGGALNSLGKGIHQIFGAAFKSLFGGMSWFSQILIGTLLVWLGLNTKNGSISLMCLALGGVLIFLSTAVSA

SEQ ID NO: 1207 - protein, 93 aa, Zika virus
SFTFTKIPAETLHGTVTVEVQYAGTDGPCKVPAQMAVDMQTLTPVGRLITANPVITESTENSKMMLELDPPFGDSYIVIGVGEKKITHHWHRS

SEQ ID NO: 1208 - protein, 97 aa, Zika virus
GKAFEATVRGAKRMAVLGDTAWDFGSVGGALNSLGKGIHQIFGAAFKSLFGGMSWFSQILIGTLLVWLGLNTKNGSISLMCLALGGVLIFLSTAVSA

SEQ ID NO: 1209 - protein, 504 aa, Zika virus
IRCIGVSNRDFVEGMSGGTWVDVVLEHGGCVTVMAQDKPTVDIELVTTTVSNMAEVRSYCYEASISDMASDSRCPTQGEAYLDKQSDTQYVCKRTLVDRGWGNGCGLFGKGSLVTCAKFACSKKMTGKSIQPENLEYRIMLSVHGSQHSGMIVNDTGHETDENRAKVEITPNSPRAEATLGGFGSLGLDCEPRTGLDFSDLYYLTMNNKHWLVHKEWFHDIPLPWHAGADTGTPHWNNKEALVEFKDAHAKRQTVVVLGSQEGAVHTALAGALEAEMDGAKGRLSSGHLKCRLKMDKLRLKGVSYSLCAAAFTFTKIPAETLHGTVTVEVQYAGTDGPCKVPAQMAVDMQTLTPVGRLITANPVITESTENSKMMLELDPPFGDSYIVIGVGEKKITHHWYRSGSTIGKAFEATVRGAKRMAVLGDTAWDFGSVGGALNSLGKGIHQIFGAAFKSLFGGMSWFSQILIGTLLMWLGLNTKNGSISLMCLALGGVLIFLSTAVSA

SEQ ID NO: 1210 - protein, 93 aa, Zika virus
AFTFTKIPAETLHGTVTVEVQYAGTDGPCKVPAQMAVDMQTLTPVGRLITANPVITESTENSKMMLELDPPFGDSYIVIGVGEKKITHHWYRS

SEQ ID NO: 1211 - protein, 97 aa, Zika virus; identical to SEQ ID NO: 1149

SEQ ID NO: 1212 - protein, 504 aa, Zika virus
IRCIGVSNRDFVEGMSGGTWVDVVLEHGGCVTVMAQDKPTVDIELVTTTVSNMAEVRSYCYEASISDMASDSRCPTQGEAYLDKQSDTQYVCKRTLVDRGWGNGCGLFGKGSLVTCAKFACSKKMTGKSIQPENLEYRIMLSVHGSQHSGMIVNDTGHETDENRAKVEITPNSPRAEATLGGFGSLGLDCEPRTGLDFSDLYYLTMNNKHWLVHREWFHDIPLPWHAGADTGTPHWNNKEALVEFKDAHAKRQTVVVLGSQEGAVHTALAGALEAEMDGAKGRLSSGHLKCRLKMDKLRLKGVSYSLCTASFTFTKIPAETLHGTVTVEVQYAGTDGPCKVPAQMAVDMQTLTPVGRLITANPVITESTENSKMMLELDPPFGDSYIVIGVGEKKITHHWHRSGSTIGKAFEATVRGAKRMAVLGDTAWDFGSVGGALNSLGRGIHQIFGAAFKSLFGGMSWFSQILIGTLLVWLGLNTKNGSISLMCLALGGVLIFLSTAVSA

SEQ ID NO: 1213 - protein, 93 aa, Zika virus; identical to SEQ ID NO: 1207

SEQ ID NO: 1214 - protein, 97 aa, Zika virus
GKAFEATVRGAKRMAVLGDTAWDFGSVGGALNSLGRGIHQIFGAAFKSLFGGMSWFSQILIGTLLVWLGLNTKNGSISLMCLALGGVLIFLSTAVSA

SEQ ID NO: 1215 - protein, 93 aa, Zika virus; identical to SEQ ID NO: 1148

SEQ ID NO: 1216 - protein, 97 aa, Zika virus; identical to SEQ ID NO: 1149

SEQ ID NO: 1217 - protein, 93 aa, Zika virus
AFTFTKVPAETLHGTVTVEVQYAGTDGPCKVPAQMAVDMQTLTPVGRLITANPVITESTENSKMMLELDPPFGDSYIVIGVGDKKITHHWHRS

SEQ ID NO: 1218 - protein, 97 aa, Zika virus; identical to SEQ ID NO: 1156

SEQ ID NO: 1219 - protein, 504 aa, Zika virus
IRCIGVSNRDFVEGMSGGTWVDVVLEHGGCVTVMAQDKPTVDIELVTTTVSNMAEVRSYCYEASISDMASDSRCPTQGEAYLDKQSDTQYVCKRTLVDRGWGNGCGLFGKGSLVTCAKFACSKKMTGKSIQPENLEYRIMLSVHGSQHSGMIVNDTGHETDENRAKVEITPNSPRAEATLGGFGSLGLDCEPRTGLDFSDLYYLTMNNKHWLVHKEWFHDIPLPWHAGADTGTPHWNNKEALVEFKDAHAKRQTVVVLGSQEGAVHTALAGALEAEMDGAKGRLSSGHLKCRLKMDKLRLKGVFYSLCTAAFTFTKIPAETLHGTVTVEVQYAGTDGPCKVPAQMAVDMQTLTPVGRLITANPVITESTENSKMMLELDPPFGDSYIVIGVGEKKITHHWHRSGSTIGKAFEATVRGAKRMAVLGDTAWDFGSVGGALNSLGKGIHQIFGAAFKSLFGGMSWFSQILIGTLLMWLGLNTKNGSISLMCLALGGVLIFLSTAVSA

SEQ ID NO: 1220 - protein, 93 aa, Zika virus; identical to SEQ ID NO: 1148

SEQ ID NO: 1221 - protein, 97 aa, Zika virus; identical to SEQ ID NO: 1149

SEQ ID NO: 1222 - protein, 504 aa, Zika virus; identical to SEQ ID NO: 5

SEQ ID NO: 1223 - protein, 93 aa, Zika virus; identical to SEQ ID NO: 1148

SEQ ID NO: 1224 - protein, 97 aa, Zika virus; identical to SEQ ID NO: 1149

SEQ ID NO: 1225 - protein, 504 aa, Zika virus
IRCIGVSNRDFVEGMSGGTWVDVVLEHGGCVTVMAQDKPTVDIELVTTTVSNMAEVRSYCYEASISDMASDSRCPTQGEAYLDKQSDTQYVCKRTLVDRGWGNGCGLFGKGSLVTCAKFACSKKMTGKSIQPENLEYRIMLSVHGSQHSGMIVNDTGHETDENRAKVEITPNSPRAEATLGGFGSLGLDCEPRTGLDFSDLYYLTMNNKHWLVHKEWFHDIPLPWHAGADTGTPHWNNKEALVEFKDAHAKRQTAVVLGSQEGAVHTALAGALEAEMDGAKGRLSSGHLKCRLKMDKLRLKGVSYSLCTASFTFTKIPAETLHGTVTVEVQYAGTDGPCKVPAQMAVDMQTLTPVGRLITANPVITESTENSKMMLELDPPFGDSYIVIGVGEKKITHHWHRSGSTIGKAFEATVRGAKRMAVLGDTAWDFGSVGGALNSLGKGIHQIFGAAFKSLFGGMSWFSQILIGTLLVWLGLNTKNGSISLMCLALGGVLIFLSTAVSA

SEQ ID NO: 1226 - protein, 93 aa, Zika virus; identical to SEQ ID NO: 1207

SEQ ID NO: 1227 - protein, 97 aa, Zika virus; identical to SEQ ID NO: 1208

SEQ ID NO: 1228 - protein, 93 aa, Zika virus
AFTFTKIPAETLHGTVTVEVQYAGTDGPCKVPAQMAVDMQTLTPVGRLITANPVITESTENSKMMLELDPPLGDSYIVIGVGEKKITHHWHRS

SEQ ID NO: 1229 - protein, 97 aa, Zika virus; identical to SEQ ID NO: 1149

SEQ ID NO: 1230 - protein, 504 aa, Zika virus
IRCIGVSNRDFVEGMSGGTWVDVVLEHGGCVTVMAQDKPTVDIELVTTTVSNMAEVRSYCYEASISDMASDSRCPTQGEAYLDKQSDTQYVCKRTLVDRGWGNGCGLFGKGSLVTCAKFACSKKMTGKSIQPENLEYRIMLSVHGSQHSGMIVNDTGHETDENRAKVEITPNSPRAEATLGGFGSLGLDCEPRTGLDFSDLYYLTMNNKHWLVHKEWFHDIPLPWHAGADTGTPHWNNKEALVEFKDAHAKRQTVVVLGSQEGAVHTALAGALEAEMDGAKGRLSSGHLKCRLKMDKLRLKGVSYSLCTAAFTFTKIPAETLHGTVTVEVQYAGTDGPCKVPAQMAVDMQTLTPVGRLITANPVITESTENSKMMLELDPPFGDSYIVIGVGEKKITHHWYRSGSTIGKAFEATVRGAKRMAVLGDTAWDFGSVGGALNSLGKGIHQIFGAAFKSLFGGMSWFSQILIGTLLMWLGLNTKNGSISLMCLALGGVLIFLSTAVSA

SEQ ID NO: 1231 - protein, 93 aa, Zika virus; identical to SEQ ID NO: 1210

SEQ ID NO: 1232 - protein, 97 aa, Zika virus; identical to SEQ ID NO: 1149

SEQ ID NO: 1233 - protein, 504 aa, Zika virus; identical to SEQ ID NO: 5

SEQ ID NO: 1234 - protein, 93 aa, Zika virus; identical to SEQ ID NO: 1148

SEQ ID NO: 1235 - protein, 97 aa, Zika virus; identical to SEQ ID NO: 1149

SEQ ID NO: 1236 - protein, 504 aa, Zika virus; identical to SEQ ID NO: 5

SEQ ID NO: 1237 - protein, 93 aa, Zika virus; identical to SEQ ID NO: 1148

SEQ ID NO: 1238 - protein, 97 aa, Zika virus; identical to SEQ ID NO: 1149

SEQ ID NO: 1239 - protein, 504 aa, Zika virus; identical to SEQ ID NO: 5

SEQ ID NO: 1240 - protein, 93 aa, Zika virus; identical to SEQ ID NO: 1148

SEQ ID NO: 1241 - protein, 97 aa, Zika virus; identical to SEQ ID NO: 1149

SEQ ID NO: 1242 - protein, 504 aa, Zika virus; identical to SEQ ID NO: 5

SEQ ID NO: 1243 - protein, 93 aa, Zika virus; identical to SEQ ID NO: 1148

SEQ ID NO: 1244 - protein, 97 aa, Zika virus; identical to SEQ ID NO: 1149

SEQ ID NO: 1245 - protein, 504 aa, Zika virus; identical to SEQ ID NO: 5

SEQ ID NO: 1246 - protein, 93 aa, Zika virus; identical to SEQ ID NO: 1148

SEQ ID NO: 1247 - protein, 97 aa, Zika virus; identical to SEQ ID NO: 1149

SEQ ID NO: 1248 - protein, 93 aa, Zika virus; identical to SEQ ID NO: 1148

SEQ ID NO: 1249 - protein, 97 aa, Zika virus; identical to SEQ ID NO: 1149

SEQ ID NO: 1250 - protein, 93 aa, Zika virus
AFTFTKIPAETLHGTVTVEVQYAGTDGPCKVPAQMAVDMQTLTPVGRLITANPVITESAENSKMMLELDPPFGDSYIVIGVGEKKITHHWHRS

SEQ ID NO: 1251 - protein, 97 aa, Zika virus
GKAFEATVRGAKRMAVLGDTAWDFGSVGGALNSLGKGIHQIFGAAFKSLFGGMSWFSQVLIGTLLMWLGLNTKNGSISLMCLALGGVLIFLSTAVSA

SEQ ID NO: 1252 - protein, 93 aa, Zika virus; identical to SEQ ID NO: 1148

SEQ ID NO: 1253 - protein, 97 aa, Zika virus; identical to SEQ ID NO: 1251

SEQ ID NO: 1254 - protein, 93 aa, Zika virus; identical to SEQ ID NO: 1250

SEQ ID NO: 1255 - protein, 97 aa, Zika virus; identical to SEQ ID NO: 1251

SEQ ID NO: 1256 - protein, 504 aa, Zika virus
IRCIGVSNRDFVEGMSGGTWVDVVLEHGGCVTVMAQDKPTVDIELVTTTVSNMAEVRSYCYEASISDMASDSRCPTQGEAYLDKQSDTQYVCKRTLVDRGWGNGCGLFGKGSLVTCAKFACSKKMTGKSIQPENLEYRIMLSVHGSQHSGMIVNDTGHETDENRAKVEITPNSPRAEATLGGFGSLGLDCEPRTGLDFSDLYYLTMNNKHWLVHKEWFHDIPLPWHAGADTGTPHWNNKEALVEFKDAHAQRQTVVVLGSQEGAVHTALAGALEAEMDGAKGRLSSGHLKCRLKMDKLRLKGVSYSLCTAAFTFTKIPAETLHGTVTVEVQYAGTDGPCKVPAQMAVDMQTLTPVGRLITANPVITESTENSKMMLELDPPFGDSYIVIGVGEKKITHHWHRSGSTIGKAFEATVRGAKRMAVLGDTAWDFGSVGGALNSLGKGIHQIFGAAFKSLFGGMSWFSQILIGTLLMWLGLNTKNGSISLMCLALGGVLIFLSTAVSA

SEQ ID NO: 1257 - protein, 93 aa, Zika virus; identical to SEQ ID NO: 1148

SEQ ID NO: 1258 - protein, 97 aa, Zika virus; identical to SEQ ID NO: 1149

SEQ ID NO: 1259 - protein, 504 aa, Zika virus; identical to SEQ ID NO: 5

SEQ ID NO: 1260 - protein, 93 aa, Zika virus; identical to SEQ ID NO: 1148

SEQ ID NO: 1261 - protein, 97 aa, Zika virus; identical to SEQ ID NO: 1149

SEQ ID NO: 1262 - protein, 504 aa, Zika virus; identical to SEQ ID NO: 5

SEQ ID NO: 1263 - protein, 93 aa, Zika virus; identical to SEQ ID NO: 1148

SEQ ID NO: 1264 - protein, 97 aa, Zika virus; identical to SEQ ID NO: 1149

SEQ ID NO: 1265 - protein, 504 aa, Zika virus; identical to SEQ ID NO: 5

SEQ ID NO: 1266 - protein, 93 aa, Zika virus; identical to SEQ ID NO: 1148

SEQ ID NO: 1267 - protein, 97 aa, Zika virus; identical to SEQ ID NO: 1149

SEQ ID NO: 1268 - protein, 504 aa, Zika virus; identical to SEQ ID NO: 5

SEQ ID NO: 1269 - protein, 93 aa, Zika virus; identical to SEQ ID NO: 1148

SEQ ID NO: 1270 - protein, 97 aa, Zika virus; identical to SEQ ID NO: 1149

SEQ ID NO: 1271 - protein, 504 aa, Zika virus; identical to SEQ ID NO: 5

SEQ ID NO: 1272 - protein, 93 aa, Zika virus; identical to SEQ ID NO: 1148

SEQ ID NO: 1273 - protein, 97 aa, Zika virus; identical to SEQ ID NO: 1149

SEQ ID NO: 1274 - protein, 504 aa, Zika virus; identical to SEQ ID NO: 5

SEQ ID NO: 1275 - protein, 93 aa, Zika virus; identical to SEQ ID NO: 1148

SEQ ID NO: 1276 - protein, 97 aa, Zika virus; identical to SEQ ID NO: 1149

SEQ ID NO: 1277 - protein, 504 aa, Zika virus
IRCIGVSNRDFVEGMSGGTWVDVVLEHGGCVTVMAQDKPTVDIELVTTTVSNMAEVRSYCYEASISDMASDSRCPTQGEAYLDKQSDTQYVCKRTLVDRGWGNGCGLFGKGSLVTCAKFACSKKMTGKSIQPENLEYRIMLSVHGSQHSGMIVNDTGHETDENRAKVEITPNSPRAEATLGRFGSLGLDCEPRTGLDFSDLYYLTMNNKHWLVHKEWFHDIPLPWHAGADTGTPHWNNKEALVEFKDAHAKRQTVVVLGSQEGAVHTALAGALEAEMDGAKGRLSSGHLKCRLKMDKLRLKGVSYSLCTAAFTFTKIPAETLHGTVTVEVQYAGTDGPCKVPAQMAVDMQTLTPVGRLITANPVITESTENSKMMLELDPPFGDSYIVIGVGEKKITHHWHRSGSTIGKAFEATVRGAKRMAVLGDTAWDFGSVGGALNSLGKGIHQIFGAAFKSLFGGMSWFSQILIGTLLMWLGLNTKNGSISLMCLALGGVLIFLSTAVSA

SEQ ID NO: 1278 - protein, 93 aa, Zika virus; identical to SEQ ID NO: 1148

SEQ ID NO: 1279 - protein, 97 aa, Zika virus; identical to SEQ ID NO: 1149

SEQ ID NO: 1280 - protein, 504 aa, Zika virus
IRCIGVSNRDFVEGMSGGTWVDVVLEHGGCVTVMAQDKPTVDIELVTTTVSNMAEVRSYCYEASISDMASDSRCPTQGEAYLDKQSDTQYVCKRTLVDRGWGNGCGLFGKGSLVTCAKFACSKKMTGKSIQPENLEYRIMLSVHGSQHSGMIVNDTGHEADENRAKVEITPNSPRAEATLGGFGSLGLDCEPRTGLDFSDLYYLTMNNKHWLVHKEWFHDIPLPWHAGADTGTPHWNNKEALVEFKDAHAKRQTVVVLGSQEGAVHTALAGALEAEMDGAKGRLSSGHLKCRLKMDKLRLKGVSYSLCTAAFAFTKIPAETLHGTVTVEVQYAGTDGPCKVPAQMAVDMQTLTPVGRLITANPVITESTENSKMMLELDPPFGDSYIVIGVGEKKITHHWHRSGSTIGKAFEATVRGAKRMAVLGDTAWDFGSVGGALNSLGKGIHQIFGAAFKSLFGGMSWFSQILIGTLLMWLGLNTKNGSISLMCLALGGVLIFLSTAVSA

SEQ ID NO: 1281 - protein, 93 aa, Zika virus
AFAFTKIPAETLHGTVTVEVQYAGTDGPCKVPAQMAVDMQTLTPVGRLITANPVITESTENSKMMLELDPPFGDSYIVIGVGEKKITHHWHRS

SEQ ID NO: 1282 - protein, 97 aa, Zika virus; identical to SEQ ID NO: 1149

SEQ ID NO: 1283 - protein, 93 aa, Zika virus; identical to SEQ ID NO: 1148

SEQ ID NO: 1284 - protein, 97 aa, Zika virus; identical to SEQ ID NO: 1149

SEQ ID NO: 1285 - protein, 93 aa, Zika virus; identical to SEQ ID NO: 1148

SEQ ID NO: 1286 - protein, 97 aa, Zika virus; identical to SEQ ID NO: 1149

SEQ ID NO: 1287 - protein, 93 aa, Zika virus; identical to SEQ ID NO: 1148

SEQ ID NO: 1288 - protein, 97 aa, Zika virus
GKAFEATVRGAKRMVVLGDTAWDFGSVGGALNSLGKGIHQIFGAAFKSLFGGMSWFSQILIGTLLMWLGLNTKNGSISLMCLALGGVLIFLSTAVSA

SEQ ID NO: 1289 - protein, 501 aa, Zika virus
IGVSNRDFVEGMSGGTWVDVVLEHGGCVTVMAQDKPTVDIELVTTTVSNMAEVRSYCYEASISDMASDSRCPTQGEAYLDKQSDTQYVCKRTLVDRGWGNGCGLFGKGSLVTCAKFACSKKMTGKSIQPENLEYRIMLSVHGSQHSGMIVNDTGHETDENRAKVEITPNSPRAEATLGGFGSLGLDCEPRTGLDFSDLYYLTMNNKHWLVHKEWFHDIPLPWHAGADTGTPHWNNKEALVEFKDAHAKRQTVVVLGSQEGAVHTALAGALEAEMDGAKGRLSSGHLKCRLKMDKLRLKGVSYSLCTAAFTFTKIPAETLHGTVTVEVQYAGTDGPCKVPAQMAVDMQTLTPVGRLITANPVITESTENSKMMLELDPPFGDSYIVIGVGEKKITHHWHRSGSTIGKAFEATVRGAKRMAVLGDTAWDFGSVGGALNSLGKGIHQIFGAAFKSLFGGMSWFSQILIGTLLMWLGLNTKNGSISLMCLALGGVLIFLSTAVSA

SEQ ID NO: 1290 - protein, 93 aa, Zika virus; identical to SEQ ID NO: 1148

SEQ ID NO: 1291 - protein, 97 aa, Zika virus; identical to SEQ ID NO: 1149

SEQ ID NO: 1292 - protein, 501 aa, Zika virus; identical to SEQ ID NO: 1289

SEQ ID NO: 1293 - protein, 93 aa, Zika virus; identical to SEQ ID NO: 1148

SEQ ID NO: 1294 - protein, 97 aa, Zika virus; identical to SEQ ID NO: 1149

SEQ ID NO: 1295 - protein, 501 aa, Zika virus; identical to SEQ ID NO: 1289

SEQ ID NO: 1296 - protein, 93 aa, Zika virus; identical to SEQ ID NO: 1148

SEQ ID NO: 1297 - protein, 97 aa, Zika virus; identical to SEQ ID NO: 1149

SEQ ID NO: 1298 - protein, 501 aa, Zika virus; identical to SEQ ID NO: 1289

SEQ ID NO: 1299 - protein, 93 aa, Zika virus; identical to SEQ ID NO: 1148

SEQ ID NO: 1300 - protein, 97 aa, Zika virus; identical to SEQ ID NO: 1149

SEQ ID NO: 1301 - protein, 501 aa, Zika virus
IGVSNRDFVEGMSGGTWVDVVLEHGGCVTVMAQDKPTVDIELVTTTVSNMAEVRSYCYEASISDMASDSRCPTQGEAYLDKQSDTQYVCKRTLVDRGWGNGCGLFGKGSLVTCAKFACSKKMTGKSIQPENLEYRIMLSVHGSQHSGMIVNDTGHETDENRAKVEITPNSPRAEATLGGFGSLGLDCELRTGLDFSDLYYLTMNNKHWLVHKEWFHDIPLPWHAGADTGTPHWNNKEALVEFKDAHAKRQTVVVLGSQEGAVHTALAGALEAEMDGAKGRLSSGHLKCRLKMDKLRLKGVSYSLCTAAFTFTKIPAETLHGTVTVEVQYAGTDGPCKVPAQMAVDMQTLTPVGRLITANPVITESTENSKMMLELDPPFGDSYIVIGVGEKKITHHWHRSGSTIGKAFEATVRGAKRMAVLGDTAWDFGSVGGALNSLGKGIHQIFGAAFKSLFGGMSWFSQILIGTLLMWLGLNTKNGSISLMCLALGGVLIFLSTAVSA

SEQ ID NO: 1302 - protein, 93 aa, Zika virus; identical to SEQ ID NO: 1148

SEQ ID NO: 1303 - protein, 97 aa, Zika virus; identical to SEQ ID NO: 1149

SEQ ID NO: 1304 - protein, 501 aa, Zika virus; identical to SEQ ID NO: 1289

SEQ ID NO: 1305 - protein, 93 aa, Zika virus; identical to SEQ ID NO: 1148

SEQ ID NO: 1306 - protein, 97 aa, Zika virus; identical to SEQ ID NO: 1149

SEQ ID NO: 1307 - protein, 501 aa, Zika virus
IGVSNRDFVEGMSGGTWVDVVLEHGGCVTVMAQDKPTVDIELVTTTVSNMAEVRSYCYEASISDMASDSRCPTQGEAYLDKQSDTQYVCKRTLVDRGWGNGCGLFGKGSLVTCAKFACSKKMTGKSIQPENLEYRIMLSVHGSQHSGMIVNDTGHETDENRAKVEITPNSPRAEATLGGFGSLGLDCEPRTGLDFSDLYYLTMNNKHWLVHKEWFHDIPLPWHAGADTGTPHWNNKEALVEFKDAHAKRQTVVVLGSQEGAVHTALAGALEAEMDGAKGRLSSGHLKCRLKMDKLRLKGVSYSLCTAAFTFTKIPAETLHGTVTVEVQYAGTDGPCKVPAQMAVDMQTLTPVGRLITANPVITESTENSKMMLELDPPFGDSYIVIGVGEKKITHHWYRSGSTIGKAFEATVRGAKRMAVLGDTAWDFGSVGGALNSLGKGIHQIFGAAFKSLFGGMSWFSQILIGTLLMWLGLNTKNGSISLMCLALGGVLIFLSTAVSA

SEQ ID NO: 1308 - protein, 93 aa, Zika virus; identical to SEQ ID NO: 1210

SEQ ID NO: 1309 - protein, 97 aa, Zika virus; identical to SEQ ID NO: 1149

SEQ ID NO: 1310 - protein, 501 aa, Zika virus; identical to SEQ ID NO: 1289

SEQ ID NO: 1311 - protein, 93 aa, Zika virus; identical to SEQ ID NO: 1148

SEQ ID NO: 1312 - protein, 97 aa, Zika virus; identical to SEQ ID NO: 1149

SEQ ID NO: 1313 - protein, 501 aa, Zika virus; identical to SEQ ID NO: 1289

SEQ ID NO: 1314 - protein, 93 aa, Zika virus; identical to SEQ ID NO: 1148

SEQ ID NO: 1315 - protein, 97 aa, Zika virus; identical to SEQ ID NO: 1149

SEQ ID NO: 1316 - protein, 501 aa, Zika virus; identical to SEQ ID NO: 1289

SEQ ID NO: 1317 - protein, 93 aa, Zika virus; identical to SEQ ID NO: 1148

SEQ ID NO: 1318 - protein, 97 aa, Zika virus; identical to SEQ ID NO: 1149

SEQ ID NO: 1319 - protein, 501 aa, Zika virus
IGVSNWDFVEGMSGGTWVDVVLEHGGCVTVMAQDKPTVDIELVTTTVSNMAEVRSYCYEASISDMASDSRCPTQGEAYLDKQSDTQYVCKRTLVDRGWGNGCGLFGKGSLVTCAKFACSKKMTGKSIQPENLEYRIMLSVHGSQHSGMIVNDTGHETDENRAKVEITPNSPRAEATLGGFGSLGLDCEPRTGLDFSDLYYLTMNNKHWLVHKEWFHDIPLPWHAGADTGTPHWNNKEALVEFKDAHAKRQTVVVLGSQEGAVHTALAGALEAEMDGAKGRLSSGHLKCRLKMDKLRLKGVSYSLCTAAFTFTKIPAETLHGTVTVEVQYAGTDGPCKVPAQMAVDMQTLTPVGRLITANPVITESTENSKMMLELDPPFGDSYIVIGVGEKKITHHWHRSGSTIGKAFEATVRGAKRMAVLGDTAWDFGSVGGALNSLGKGIHQIFGAAFKLLFGGMSWFSQILIGTLLMWLGLNTKNGSISLMCLALGGVLIFLSTAVSA

SEQ ID NO: 1320 - protein, 93 aa, Zika virus; identical to SEQ ID NO: 1148

SEQ ID NO: 1321 - protein, 97 aa, Zika virus
GKAFEATVRGAKRMAVLGDTAWDFGSVGGALNSLGKGIHQIFGAAFKLLFGGMSWFSQILIGTLLMWLGLNTKNGSISLMCLALGGVLIFLSTAVSA

SEQ ID NO: 1322 - protein, 501 aa, Zika virus
IGVSNRDFVEGMSGGTWVDVVLEHGGCVTVMAQDKPTVDIELVTTTVSNMAEVRSYCYEASISDMASDSRCPTQGEAYLDKQSDTQYVCKRTLVDRGWGNGCGLFGKGSLVTCAKFACSKKMTGKSIQPENLEYRIMLSVHGSQHSGMIVNDTGHETDENRAKVEITPNSPRAEATLGGFGSLGLDCEPRTGLDFSDLYYLTMNNKHWLVHKEWFHDIPLPWHAGADTGTPHWNNKEALVEFKDAHAKRQTVVVLGSQEGAVHTALAGALEAEMDGAKGRLSSGHLKCRLKMDKLRLKGVSYSLCTAAFTFTKIPAETLHGTVTVEVQYAGTDGPCKVPAQMAVDMQTLTPVGRLITANPVITESTENSKMMLELDPPFGDSYIVIGVGEKKITHHWHRSGSTIGKAFEATVRGAKRMAVLGDTAWDFGSVGGALNSLGKGIHQIFGAAFKLLFGGMSWFSQILIGTLLMWLGLNTKNGSISLMCLALGGVLIFLSTAVSA

SEQ ID NO: 1323 - protein, 93 aa, Zika virus; identical to SEQ ID NO: 1148

SEQ ID NO: 1324 - protein, 97 aa, Zika virus; identical to SEQ ID NO: 1321

SEQ ID NO: 1325 - protein, 93 aa, Zika virus; identical to SEQ ID NO: 1217

SEQ ID NO: 1326 - protein, 97 aa, Zika virus; identical to SEQ ID NO: 1156

SEQ ID NO: 1327 - protein, 93 aa, Zika virus
AFTFTKIPAETLHGTVTVELQYAGTDGPCKVPAQMAVDMQTLTPVGRLITANPVITESTENSKMMLELDPPFGDSYIVIGVGEKKITHHWHRS

SEQ ID NO: 1328 - protein, 97 aa, Zika virus; identical to SEQ ID NO: 1149

SEQ ID NO: 1329 - protein, 301 aa, Zika virus; identical to SEQ ID NO: 1151

SEQ ID NO: 1330 - protein, 93 aa, Zika virus; identical to SEQ ID NO: 1148

SEQ ID NO: 1331 - protein, 97 aa, Zika virus; identical to SEQ ID NO: 1149

SEQ ID NO: 1332 - protein, 301 aa, Zika virus; identical to SEQ ID NO: 1151

SEQ ID NO: 1333 - protein, 93 aa, Zika virus; identical to SEQ ID NO: 1148

SEQ ID NO: 1334 - protein, 97 aa, Zika virus; identical to SEQ ID NO: 1149

SEQ ID NO: 1335 - protein, 301 aa, Zika virus; identical to SEQ ID NO: 1151

SEQ ID NO: 1336 - protein, 93 aa, Zika virus; identical to SEQ ID NO: 1148

SEQ ID NO: 1337 - protein, 97 aa, Zika virus; identical to SEQ ID NO: 1149

SEQ ID NO: 1338 - protein, 301 aa, Zika virus; identical to SEQ ID NO: 1151

SEQ ID NO: 1339 - protein, 93 aa, Zika virus; identical to SEQ ID NO: 1148

SEQ ID NO: 1340 - protein, 97 aa, Zika virus; identical to SEQ ID NO: 1149

SEQ ID NO: 1341 - protein, 301 aa, Zika virus; identical to SEQ ID NO: 1151

SEQ ID NO: 1342 - protein, 93 aa, Zika virus; identical to SEQ ID NO: 1148

SEQ ID NO: 1343 - protein, 97 aa, Zika virus; identical to SEQ ID NO: 1149

SEQ ID NO: 1344 - protein, 301 aa, Zika virus; identical to SEQ ID NO: 1151

SEQ ID NO: 1345 - protein, 93 aa, Zika virus; identical to SEQ ID NO: 1148

SEQ ID NO: 1346 - protein, 97 aa, Zika virus; identical to SEQ ID NO: 1149

SEQ ID NO: 1347 - protein, 301 aa, Zika virus; identical to SEQ ID NO: 1151

SEQ ID NO: 1348 - protein, 93 aa, Zika virus; identical to SEQ ID NO: 1148

SEQ ID NO: 1349 - protein, 97 aa, Zika virus; identical to SEQ ID NO: 1149

SEQ ID NO: 1350 - protein, 301 aa, Zika virus; identical to SEQ ID NO: 1151

SEQ ID NO: 1351 - protein, 93 aa, Zika virus; identical to SEQ ID NO: 1148

SEQ ID NO: 1352 - protein, 97 aa, Zika virus; identical to SEQ ID NO: 1149

SEQ ID NO: 1353 - protein, 301 aa, Zika virus; identical to SEQ ID NO: 1151

SEQ ID NO: 1354 - protein, 93 aa, Zika virus; identical to SEQ ID NO: 1148

SEQ ID NO: 1355 - protein, 97 aa, Zika virus; identical to SEQ ID NO: 1149

SEQ ID NO: 1356 - protein, 301 aa, Zika virus; identical to SEQ ID NO: 1151

SEQ ID NO: 1357 - protein, 93 aa, Zika virus; identical to SEQ ID NO: 1148

SEQ ID NO: 1358 - protein, 97 aa, Zika virus; identical to SEQ ID NO: 1149

SEQ ID NO: 1359 - protein, 301 aa, Zika virus; identical to SEQ ID NO: 1151

SEQ ID NO: 1360 - protein, 93 aa, Zika virus; identical to SEQ ID NO: 1148

SEQ ID NO: 1361 - protein, 97 aa, Zika virus; identical to SEQ ID NO: 1149

SEQ ID NO: 1362 - protein, 301 aa, Zika virus; identical to SEQ ID NO: 1151

SEQ ID NO: 1363 - protein, 93 aa, Zika virus; identical to SEQ ID NO: 1148

SEQ ID NO: 1364 - protein, 97 aa, Zika virus; identical to SEQ ID NO: 1149

SEQ ID NO: 1365 - protein, 301 aa, Zika virus; identical to SEQ ID NO: 1151

SEQ ID NO: 1366 - protein, 93 aa, Zika virus; identical to SEQ ID NO: 1148

SEQ ID NO: 1367 - protein, 97 aa, Zika virus; identical to SEQ ID NO: 1149

SEQ ID NO: 1368 - protein, 301 aa, Zika virus; identical to SEQ ID NO: 1151

SEQ ID NO: 1369 - protein, 93 aa, Zika virus; identical to SEQ ID NO: 1148

SEQ ID NO: 1370 - protein, 97 aa, Zika virus; identical to SEQ ID NO: 1149

SEQ ID NO: 1371 - protein, 301 aa, Zika virus; identical to SEQ ID NO: 1151

SEQ ID NO: 1372 - protein, 93 aa, Zika virus; identical to SEQ ID NO: 1148

SEQ ID NO: 1373 - protein, 97 aa, Zika virus; identical to SEQ ID NO: 1149

SEQ ID NO: 1374 - protein, 301 aa, Zika virus
RCIGVSNRDFVEGMSGGTWVDVVLEHGGCVTVMAQDKPTVDIELVTTTVSNMAEVRSYCYEASISDMASDSRCPTQGEAYLDKQSDTQYVCKRTLVDRGWGNGCGLFGKGSLVTCARFACSKKMTGKSIQPENLEYRIMLSVHGSQHSGMIVNDTGHETDENRAKVEITPNSPRAEATLGGFGSLGLDCEPRTGLDFSDLYYLTMNNKHWLVHKEWFHDIPLPWHAGADTGTPHWNNKEALVEFKDAHAKRQTVVVLGSQEGAVHTALAGALEAEMDGAKGRLSSGHLKCRLKMDKLRLKG

SEQ ID NO: 1375 - protein, 93 aa, Zika virus; identical to SEQ ID NO: 1148

SEQ ID NO: 1376 - protein, 97 aa, Zika virus; identical to SEQ ID NO: 1149

SEQ ID NO: 1377 - protein, 301 aa, Zika virus; identical to SEQ ID NO: 1374

SEQ ID NO: 1378 - protein, 93 aa, Zika virus; identical to SEQ ID NO: 1148

SEQ ID NO: 1379 - protein, 97 aa, Zika virus; identical to SEQ ID NO: 1149

SEQ ID NO: 1380 - protein, 301 aa, Zika virus; identical to SEQ ID NO: 1374

SEQ ID NO: 1381 - protein, 93 aa, Zika virus; identical to SEQ ID NO: 1148

SEQ ID NO: 1382 - protein, 97 aa, Zika virus; identical to SEQ ID NO: 1149

SEQ ID NO: 1383 - protein, 301 aa, Zika virus; identical to SEQ ID NO: 1374

SEQ ID NO: 1384 - protein, 93 aa, Zika virus; identical to SEQ ID NO: 1148

SEQ ID NO: 1385 - protein, 97 aa, Zika virus; identical to SEQ ID NO: 1149

SEQ ID NO: 1386 - protein, 301 aa, Zika virus; identical to SEQ ID NO: 1374

SEQ ID NO: 1387 - protein, 93 aa, Zika virus; identical to SEQ ID NO: 1148

SEQ ID NO: 1388 - protein, 97 aa, Zika virus; identical to SEQ ID NO: 1149

SEQ ID NO: 1389 - protein, 301 aa, Zika virus; identical to SEQ ID NO: 1374

SEQ ID NO: 1390 - protein, 93 aa, Zika virus; identical to SEQ ID NO: 1148

SEQ ID NO: 1391 - protein, 97 aa, Zika virus; identical to SEQ ID NO: 1149

SEQ ID NO: 1392 - protein, 297 aa, Zika virus
RCIGVSNRDFVEGMSGGTWVDVVLEHGGCVTVMAQDKPTVDIELVTTTVSNMAEVRSYCYEASISDMASDSRCPTQGEAYLDKQSDTQYVCKRTLVDRGWGNGCGLFGKGSLVTCAKFTCSKKMTGKSIQPENLEYRIMLSVHGSQHSGMIGYETDENRAKVEVTPNSPRAEATLGGFGSLGLDCEPRTGLDFSDLYYLTMNNKHWLVHKEWFHDIPLPWHAGADTGTPHWNNKEALVEFKDAHAKRQTVVVLGSQEGAVHTALAGALEAEMDGAKGKLFSGHLKCRLKMDKLRLKG

SEQ ID NO: 1393 - protein, 93 aa, Zika virus; identical to SEQ ID NO: 1155

SEQ ID NO: 1394 - protein, 97 aa, Zika virus; identical to SEQ ID NO: 1156

SEQ ID NO: 1395 - protein, 93 aa, Zika virus; identical to SEQ ID NO: 1148

SEQ ID NO: 1396 - protein, 97 aa, Zika virus; identical to SEQ ID NO: 1149

SEQ ID NO: 1397 - protein, 301 aa, Zika virus
RCIGVSNRDFVEGMSGGTWVDIVLEHGGCVTVMAQDKPTVDIELVTTTVSNMAEVRSYCYEASISDMASDSRCPTQGEAYLDKQSDTQYVCKRTLVDRGWGNGCGLFGKGSLVTCAKFACSKKMTGKSIQPENLEYRIMLSVHGSQHSGMIVNDTGHETDENRAKVEITPNSPRAEATLGGFGSLGLDCEPRTGLDFSDLYYLTMNNKHWLVHKEWFHDIPLPWHAGADTGTPHWNNKEALVEFKDAHAKRQTVVVLGSQEGAVHTALAGALEAEMDGAKGRLSSGHLKCRLKMDKLRLKG

SEQ ID NO: 1398 - protein, 93 aa, Zika virus; identical to SEQ ID NO: 1148

SEQ ID NO: 1399 - protein, 97 aa, Zika virus; identical to SEQ ID NO: 1149

SEQ ID NO: 1400 - protein, 301 aa, Zika virus
RCIGVSNRDFVEGMSGGTWVDVVLEHGGCVTVMAQDKPTVDIELVTTTVSNMAEVRSYCYEASISDMASDSRCPTQGEAYLDKQSDTQYVCKRTLVDRGWGNGCGLFGKGSLVTCAKFACSKKMTGKSIQPENLEYRIMLSVHGSQHSGMIVNDTGHETDENRAKVEITPNSPRAEATLGGFGSLGLDCEPRTGLDFSDLYYLTMNNKHWLVHKEWFHDIPLPWHTGADTGTPHWNNKEALVEFKDAHAKRQTVVVLGSQEGAVHTALAGALEAEMDGAKGRLSSGHLKCRLKMDKLRLKG

SEQ ID NO: 1401 - protein, 93 aa, Zika virus
AFTFTKIPAETLHGTVTVEVQYAGTDGPCKVPAQMAVDMQTLTPVGRLITANPVITEGTENSKMMLELDPPFGDSYIVIGVGEKKITHHWHRS

SEQ ID NO: 1402 - protein, 97 aa, Zika virus
GKAFEATVRGAKRMAVLGDTAWDFGSVGGVLNSLGKGIHQIFGAAFKSLFGGMSWFSQILIGTLLMWLGLNTKNGSISLMCLALGGVLIFLSTAVSA

SEQ ID NO: 1403 - protein, 301 aa, Zika virus; identical to SEQ ID NO: 1400

SEQ ID NO: 1404 - protein, 93 aa, Zika virus; identical to SEQ ID NO: 1401

SEQ ID NO: 1405 - protein, 97 aa, Zika virus; identical to SEQ ID NO: 1402

SEQ ID NO: 1406 - protein, 504 aa, Zika virus
IRCIGVSNRDFVEGMSGGTWVDVVLEHGGCVTVMAQDKPTVDIELVTTTVSNMAEVRSYCYEASISDMASDSRCPTQGEAYLDKQSDTQYVCKRTLVDRGWGNGCGLFGKGSLVTCAKFACSKKMTGKSIQPENLEYRIMLSVHGSQHSGMIVNDTGHETDENRAKVEITPNSPRAEATLGGFGSLGLDCEPRTGLDFSDLYYLTMNNKHWLVHKEWFHDIPLPWHAGADTGTPHWNNKEALVEFKDAHAKRQTVVVLGSQEGAVHTALAGALEAEMDGAKGRLSSGHLKCRLKMDKLRLKGVSYSLCTAAFTFTKIPAETLHGTVTVELQYAGTDGPCKVPAQMAVDMQTLTPVGRLITANPVITESTENSKMMLELDPPFGDSYIVIGVGEKKITHHWHRSGSTIGKAFEATVRGAKRMAVLGDTAWDFGSVGGALNSLGKGIHQIFGAAFKSLFGGMSWFSQILIGTLLMWLGLNTKNGSISLMCLALGGVLIFLSTAVSA

SEQ ID NO: 1407 - protein, 301 aa, Zika virus; identical to SEQ ID NO: 1151

SEQ ID NO: 1408 - protein, 93 aa, Zika virus; identical to SEQ ID NO: 1327

SEQ ID NO: 1409 - protein, 97 aa, Zika virus; identical to SEQ ID NO: 1149

SEQ ID NO: 1410 - protein, 504 aa, Zika virus; identical to SEQ ID NO: 1406

SEQ ID NO: 1411 - protein, 301 aa, Zika virus; identical to SEQ ID NO: 1151

SEQ ID NO: 1412 - protein, 93 aa, Zika virus; identical to SEQ ID NO: 1327

SEQ ID NO: 1413 - protein, 97 aa, Zika virus; identical to SEQ ID NO: 1149

SEQ ID NO: 1414 - protein, 504 aa, Zika virus; identical to SEQ ID NO: 1406

SEQ ID NO: 1415 - protein, 301 aa, Zika virus; identical to SEQ ID NO: 1151

SEQ ID NO: 1416 - protein, 93 aa, Zika virus; identical to SEQ ID NO: 1327

SEQ ID NO: 1417 - protein, 97 aa, Zika virus; identical to SEQ ID NO: 1149

SEQ ID NO: 1418 - protein, 301 aa, Zika virus
RCIGVSNRDFVEGMSGGTWVDVVLEHGGCVTVMAQDKPTVDIELVTTTVSNMAEVRSYCYEASISDMASDSRCPTQGEAYLDKQSDTQYVCKRTLVDRGWGNGCGLFGKGSLVTCAKFTCSKKMTGKSIQPENLEYRIMLSVHGSQHSGMIVNDTGHETDENRAKVEVTPNSPRAEATLGGFGSLGLDCEPRTGLDFSDLYYLTMNNKHWLVHKEWFHDIPLPWHAGADTGTPHWNNKEALVEFKDAHAKRQTVVVLGSQEGAVHTALAGALEAEMDGAKGRLFSGHLKCRLKMDKLRLKG

SEQ ID NO: 1419 - protein, 93 aa, Zika virus; identical to SEQ ID NO: 1217

SEQ ID NO: 1420 - protein, 97 aa, Zika virus
GKAFEATVRGAKRMAVLGDTAWDFGSVGGVFNSLGKGVHQIFGAAFKSLFGGMSWFSQILIGTLLVWLGLNTKNGSISLTCLALGGVMIFLSTAVSA

SEQ ID NO: 1421 - protein, 301 aa, Zika virus; identical to SEQ ID NO: 1151

SEQ ID NO: 1422 - protein, 93 aa, Zika virus; identical to SEQ ID NO: 1148

SEQ ID NO: 1423 - protein, 97 aa, Zika virus; identical to SEQ ID NO: 1149

SEQ ID NO: 1424 - protein, 93 aa, Zika virus; identical to SEQ ID NO: 1148

SEQ ID NO: 1425 - protein, 97 aa, Zika virus; identical to SEQ ID NO: 1149

SEQ ID NO: 1426 - protein, 301 aa, Zika virus; identical to SEQ ID NO: 1151

SEQ ID NO: 1427 - protein, 93 aa, Zika virus; identical to SEQ ID NO: 1148

SEQ ID NO: 1428 - protein, 97 aa, Zika virus; identical to SEQ ID NO: 1149

SEQ ID NO: 1429 - protein, 301 aa, Zika virus; identical to SEQ ID NO: 1151

SEQ ID NO: 1430 - protein, 93 aa, Zika virus; identical to SEQ ID NO: 1210

SEQ ID NO: 1431 - protein, 97 aa, Zika virus; identical to SEQ ID NO: 1149

SEQ ID NO: 1432 - protein, 93 aa, Zika virus; identical to SEQ ID NO: 1148

SEQ ID NO: 1433 - protein, 97 aa, Zika virus; identical to SEQ ID NO: 1149

SEQ ID NO: 1434 - protein, 301 aa, Zika virus; identical to SEQ ID NO: 1151

SEQ ID NO: 1435 - protein, 93 aa, Zika virus; identical to SEQ ID NO: 1148

SEQ ID NO: 1436 - protein, 97 aa, Zika virus; identical to SEQ ID NO: 1149

SEQ ID NO: 1437 - protein, 301 aa, Zika virus; identical to SEQ ID NO: 1151

SEQ ID NO: 1438 - protein, 93 aa, Zika virus; identical to SEQ ID NO: 1148

SEQ ID NO: 1439 - protein, 97 aa, Zika virus; identical to SEQ ID NO: 1149

SEQ ID NO: 1440 - protein, 301 aa, Zika virus; identical to SEQ ID NO: 1151

SEQ ID NO: 1441 - protein, 93 aa, Zika virus; identical to SEQ ID NO: 1148

SEQ ID NO: 1442 - protein, 97 aa, Zika virus; identical to SEQ ID NO: 1149

SEQ ID NO: 1443 - protein, 301 aa, Zika virus; identical to SEQ ID NO: 1151

SEQ ID NO: 1444 - protein, 93 aa, Zika virus; identical to SEQ ID NO: 1148

SEQ ID NO: 1445 - protein, 97 aa, Zika virus; identical to SEQ ID NO: 1149

SEQ ID NO: 1446 - protein, 301 aa, Zika virus; identical to SEQ ID NO: 1151

SEQ ID NO: 1447 - protein, 93 aa, Zika virus; identical to SEQ ID NO: 1148

SEQ ID NO: 1448 - protein, 97 aa, Zika virus; identical to SEQ ID NO: 1149

SEQ ID NO: 1449 - protein, 301 aa, Zika virus; identical to SEQ ID NO: 1151

SEQ ID NO: 1450 - protein, 93 aa, Zika virus; identical to SEQ ID NO: 1148

SEQ ID NO: 1451 - protein, 97 aa, Zika virus; identical to SEQ ID NO: 1149

SEQ ID NO: 1452 - protein, 301 aa, Zika virus; identical to SEQ ID NO: 1151

SEQ ID NO: 1453 - protein, 93 aa, Zika virus; identical to SEQ ID NO: 1148

SEQ ID NO: 1454 - protein, 97 aa, Zika virus; identical to SEQ ID NO: 1149

SEQ ID NO: 1455 - protein, 301 aa, Zika virus
RCIGVSNRDFVEGMSGGTWVDVVLEHGGCVTVMAQDKPTVDIELVTTTVSNMAEVRSYCYEASISDMASDSRCPTQGEAYLDKQSDTQYVCKRTLVDRGWGNGCGLFGKGSLVTCAKFACSKKMTGKSIQPENLEYRIMLSVHGSQHSGMIVNDTGHETDENRARVEITPNSPRAEATLGGFGSLGLDCEPRTGLDFSDLYYLTMNNKHWLVHKEWFHDIPLPWHAGADTGTPHWNNKEALVEFKDAHAKRQTVVVLGSQEGAVHTALAGALEAEMDGAKGRLSSGHLKCRLKMDKLRLKG

SEQ ID NO: 1456 - protein, 93 aa, Zika virus; identical to SEQ ID NO: 1148

SEQ ID NO: 1457 - protein, 97 aa, Zika virus; identical to SEQ ID NO: 1149

SEQ ID NO: 1458 - protein, 93 aa, Zika virus; identical to SEQ ID NO: 1217

SEQ ID NO: 1459 - protein, 97 aa, Zika virus; identical to SEQ ID NO: 1156

SEQ ID NO: 1460 - protein, 301 aa, Zika virus; identical to SEQ ID NO: 1418

SEQ ID NO: 1461 - protein, 93 aa, Zika virus; identical to SEQ ID NO: 1217

SEQ ID NO: 1462 - protein, 97 aa, Zika virus; identical to SEQ ID NO: 1156

SEQ ID NO: 1463 - protein, 93 aa, Zika virus; identical to SEQ ID NO: 1148

SEQ ID NO: 1464 - protein, 97 aa, Zika virus; identical to SEQ ID NO: 1208

SEQ ID NO: 1465 - protein, 301 aa, Zika virus; identical to SEQ ID NO: 1151

SEQ ID NO: 1466 - protein, 93 aa, Zika virus; identical to SEQ ID NO: 1148

SEQ ID NO: 1467 - protein, 97 aa, Zika virus; identical to SEQ ID NO: 1149

SEQ ID NO: 1468 - protein, 504 aa, Zika virus
IRCIGVSNRDFVEGMSGGTWVDVVLEHGGCVTVMAQDKPTVDIELVTTTVTNMAEVRSYCYEASISDMASDSRCPTQGEAYLDKQSDTQYVCKRTLVDRGWGNGCGLFGKGSLVTCAKFACSKKMTGKSIQPENLEYRIMLSVHGSQHSGMIVNDTGHETDENRAKVEITPNSPRAEATLGGFGSLGLDCEPRTGLDFSDLYYLTMNNKHWLVHKEWFHDIPLPWHAGADTGTPHWNNKEALVEFKDAHAKRQTVVVLGSQEGAVHTALAGALEAEMDGAKGRLSSGHLKCRLKMDKLRLKGVSYSLCTAAFTFTKIPAETLHGTVTVEVQYAGTDGPCKVPAQMAVDMQTLTPVGRLITANPVITESTENSKMMLELDPPFGDSYIVIGVGEKKITHHWHRSGSTIGKAFEATVRGAKRMAVLGDTAWDFGSVGGALNSLGKGIHQIFGAAFKSLFGGMSWFSQILIGTLLMWLGLNTKNGSISLMCLALGGVLIFLSTAVSA

SEQ ID NO: 1469 - protein, 301 aa, Zika virus
RCIGVSNRDFVEGMSGGTWVDVVLEHGGCVTVMAQDKPTVDIELVTTTVTNMAEVRSYCYEASISDMASDSRCPTQGEAYLDKQSDTQYVCKRTLVDRGWGNGCGLFGKGSLVTCAKFACSKKMTGKSIQPENLEYRIMLSVHGSQHSGMIVNDTGHETDENRAKVEITPNSPRAEATLGGFGSLGLDCEPRTGLDFSDLYYLTMNNKHWLVHKEWFHDIPLPWHAGADTGTPHWNNKEALVEFKDAHAKRQTVVVLGSQEGAVHTALAGALEAEMDGAKGRLSSGHLKCRLKMDKLRLKG

SEQ ID NO: 1470 - protein, 93 aa, Zika virus; identical to SEQ ID NO: 1148

SEQ ID NO: 1471 - protein, 97 aa, Zika virus; identical to SEQ ID NO: 1149

SEQ ID NO: 1472 - protein, 504 aa, Zika virus; identical to SEQ ID NO: 5

SEQ ID NO: 1473 - protein, 301 aa, Zika virus; identical to SEQ ID NO: 1151

SEQ ID NO: 1474 - protein, 93 aa, Zika virus; identical to SEQ ID NO: 1148

SEQ ID NO: 1475 - protein, 97 aa, Zika virus; identical to SEQ ID NO: 1149

SEQ ID NO: 1476 - protein, 504 aa, Zika virus; identical to SEQ ID NO: 5

SEQ ID NO: 1477 - protein, 301 aa, Zika virus; identical to SEQ ID NO: 1151

SEQ ID NO: 1478 - protein, 93 aa, Zika virus; identical to SEQ ID NO: 1148

SEQ ID NO: 1479 - protein, 97 aa, Zika virus; identical to SEQ ID NO: 1149

SEQ ID NO: 1480 - protein, 500 aa, Zika virus
IRCIGVSNRDFVEGMSGGTWVDVVLEHGGCVTVMAQDKPTVDIELVTTTVSNMAEVRSYCYEASISDMASDSRCPTQGEAYLDKQSDTQYVCKRTLVDRGWGNGCGLFGKGSLVTCAKFTCSKKMTGKSIQPENLEYRIMLSVHGSQHSGMIGYETDDNRAKVEVTPNSPRAEATLGGFGSLGLDCEPRTGLDFSDLYYLTMNNKHWLVHKEWFHDIPLPWHAGADTGTPHWNNKEALVEFKDAHAKRQTVVVLGSQEGAVHTALAGALEAEMDGAKGKLFSGHLKCRLKMDKLRLKGVSYSLCTAAFTFTKVPAETLHGTVTVEVQYAGTDGPCKIPVQMAVDMQTLTPVGRLITANPVITESTENSKMMLELDPPFGDSYIVIGVGDKKITHHWYRSGSTIGKAFEATVRGAKRMAVLGDTAWDFGSVGGVFNSLGKGIHQIFGAAFKSLFGGMSWFSQILIGTLLVWLGLNTKNGSISLTCLALGGVMIFLSTAVSA

SEQ ID NO: 1481 - protein, 297 aa, Zika virus
RCIGVSNRDFVEGMSGGTWVDVVLEHGGCVTVMAQDKPTVDIELVTTTVSNMAEVRSYCYEASISDMASDSRCPTQGEAYLDKQSDTQYVCKRTLVDRGWGNGCGLFGKGSLVTCAKFTCSKKMTGKSIQPENLEYRIMLSVHGSQHSGMIGYETDDNRAKVEVTPNSPRAEATLGGFGSLGLDCEPRTGLDFSDLYYLTMNNKHWLVHKEWFHDIPLPWHAGADTGTPHWNNKEALVEFKDAHAKRQTVVVLGSQEGAVHTALAGALEAEMDGAKGKLFSGHLKCRLKMDKLRLKG

SEQ ID NO: 1482 - protein, 93 aa, Zika virus
AFTFTKVPAETLHGTVTVEVQYAGTDGPCKIPVQMAVDMQTLTPVGRLITANPVITESTENSKMMLELDPPFGDSYIVIGVGDKKITHHWYRS

SEQ ID NO: 1483 - protein, 97 aa, Zika virus; identical to SEQ ID NO: 1156

SEQ ID NO: 1484 - protein, 500 aa, Zika virus
IRCIGVSNRDFVEGMSGGTWVDVVLEHGGCVTVMAQDKPTVDIELVTTTVSNMAEVRSYCYEASISDMASDSRCPTQGEAYLDKQSDTQYVCKRTLVDRGWGNGCGLFGKGSLVTCAKFTCSKKMTGKSIQPENLEYRIMLSVHGSQHSGMIGYETDDNRAKVEVTPNSPRAEATLGGFGSLGLDCEPRTGLDFSDLYYLTMNNKHWLVHKEWFHDIPLPWHAGADTGTPHWNNKEALVEFKDAHAKRQTVVVLGSQEGAVHTALAGALEAEMDGAKGKLFSGHLKCRLKMDKLRLKGVSYSLCTAAFTFTKVPAETLHGTVTVEVQYAGTDGPCKIPVQMAVDMQTLTPVGRLITANPVITENTENSKMMLELDPPFGDSYIVIGVGDKKITHHWYRSGSTIGKAFEATVRGAKRMAVLGDTAWDFGSVGGVFNSLGKGIHQIFGAAFKSLFGGMSWFSQILIGTLLVWLGLNTKNGSISLTCLALGGVMIFLSTAVSA

SEQ ID NO: 1485 - protein, 297 aa, Zika virus; identical to SEQ ID NO: 1481

SEQ ID NO: 1486 - protein, 93 aa, Zika virus
AFTFTKVPAETLHGTVTVEVQYAGTDGPCKIPVQMAVDMQTLTPVGRLITANPVITENTENSKMMLELDPPFGDSYIVIGVGDKKITHHWYRS

SEQ ID NO: 1487 - protein, 97 aa, Zika virus; identical to SEQ ID NO: 1156

SEQ ID NO: 1488 - protein, 500 aa, Zika virus
IRCIGVSNRDFVEGMSGGTWVDVVLEHGGCVTVMAQDKPTVDIELVTTTVSNMAEVRSYCYEASISDMASDSRCPTQGEAYLDKQSDTQYVCKRTLVDRGWGNGCGLFGKGSLVTCAKFTCSKKMTGKSIQPENLEYRIMLSVHGSQHSGMIGYETDGNRAKVEVTPNSPRAEATLGGFGSLGLDCEPRTGLDFSDLYYLTMNNKHWLVHKEWFHDIPLPWHAGADTGTPHWNNKEALVEFKDAHAKRQTVVVLGSQEGAVHTALAGALEAEMDGAKGKLFSGHLKCRLKMDKLRLKGVSYSLCTAAFTFTKVPAETLHGTVTVEVQYAGTDGPCKIPVQMAVDMQTLTPVGRLITANPVITESTENSKMMLELDPPFGDSYIVIGVGDKKITHHWHRSGSTIGKAFEATVRGAKRMAVLGDTAWDFGSVGGVFNSLGKGIHQIFGAAFKSLFGGMSWFSQILIGTLLVWLGLNTKNGSISLTCLALGGVMIFLSTAVSA

SEQ ID NO: 1489 - protein, 297 aa, Zika virus
RCIGVSNRDFVEGMSGGTWVDVVLEHGGCVTVMAQDKPTVDIELVTTTVSNMAEVRSYCYEASISDMASDSRCPTQGEAYLDKQSDTQYVCKRTLVDRGWGNGCGLFGKGSLVTCAKFTCSKKMTGKSIQPENLEYRIMLSVHGSQHSGMIGYETDGNRAKVEVTPNSPRAEATLGGFGSLGLDCEPRTGLDFSDLYYLTMNNKHWLVHKEWFHDIPLPWHAGADTGTPHWNNKEALVEFKDAHAKRQTVVVLGSQEGAVHTALAGALEAEMDGAKGKLFSGHLKCRLKMDKLRLKG

SEQ ID NO: 1490 - protein, 93 aa, Zika virus; identical to SEQ ID NO: 1155

SEQ ID NO: 1491 - protein, 97 aa, Zika virus; identical to SEQ ID NO: 1156

SEQ ID NO: 1492 - protein, 500 aa, Zika virus
IRCIGVSNRDFVEGMSGGTWVDVVLEHGGCVTVMAQDKPTVDIELVTTTVSNMAEVRSYCYEASISDMASDSRCPTQGEAYLDKQSDTQYVCKRTLVDRGWGNGCGLFGKGSLVTCAKFTCSKKMTGKSIQPENLEYRIMLSVHGSQHSGMIGYETDENRAKVEVTPNSPRAEATLGGFGSLGLDCEPRTGLDFSDLYYLTMNNKHWLVHKEWFHDIPLPWHAGADTGTPHWNNKEALVEFKDAHAKRQTVVVLGSQEGAVHTALAGALEAEMDGAKGKLFSGHLKCRLKMDKLRLKGVSYSLCTAAFTFTKVPAETLHGTVTVEVQYAGTDGPCKIPVQMAVDMQTLTPVGRLITANPVITERTENSKMMLELDPPFGDSYIVIGVGDKKITHHWHRSGSTIGKAFEATVRGAKRMAVLGDTAWDFGSVGGVFNSLGKGIHQIFGAAFKSLFGGMSWFSQILIGTLLVWLGLNTKNGSISLTCLALGGVMIFLSTAVSA

SEQ ID NO: 1493 - protein, 297 aa, Zika virus; identical to SEQ ID NO: 1392

SEQ ID NO: 1494 - protein, 93 aa, Zika virus
AFTFTKVPAETLHGTVTVEVQYAGTDGPCKIPVQMAVDMQTLTPVGRLITANPVITERTENSKMMLELDPPFGDSYIVIGVGDKKITHHWHRS

SEQ ID NO: 1495 - protein, 97 aa, Zika virus; identical to SEQ ID NO: 1156

SEQ ID NO: 1496 - protein, 500 aa, Zika virus; identical to SEQ ID NO: 1488

SEQ ID NO: 1497 - protein, 297 aa, Zika virus; identical to SEQ ID NO: 1489

SEQ ID NO: 1498 - protein, 93 aa, Zika virus; identical to SEQ ID NO: 1155

SEQ ID NO: 1499 - protein, 97 aa, Zika virus; identical to SEQ ID NO: 1156

SEQ ID NO: 1500 - protein, 500 aa, Zika virus
IRCIGVSNRDFVEGMSGGTWVDVVLEHGGCVTVMAQDKPTVDIELVTTTVSNMAEVRSYCYEASISDMASDSRCPTQGEAYLDKQSDTQYVCKRTLVDRGWGNGCGLFGKGSLVTCAKFTCSKKMTGKSIQPENLEYRIMLSVHGSQHSGMIGYETDGNRAKVEVTPNSPRAEATLGGFGSLGLDCEPRTGLDFSDLYYLTMNNKHWLVHKEWFHDIPLPWHAGADTGTPHWNNKEALVEFKDAHAKRQTVVVLGSQEGAVHTALAGALEAEMDGAKGKLFSGHLKCRLKMDKLRLMGVSYSLCTAAFTFTKVPAETLHGTVTVEVQYAGTDGPCKIPVQMAVDMQTLTPVGRLITANPVITESTENSKMMLELDPPFGDSYIVIGVGDKKITHHWYRSGSTIGKAFEATVRGAKRMAVLGDTAWDFGSVGGVFNSLGKGIHQIFGAAFKSLFGGMSWFSQILIGTLLVWLGLNTKNGSISLTCLALGGVMIFLSTAVSA

SEQ ID NO: 1501 - protein, 297 aa, Zika virus
RCIGVSNRDFVEGMSGGTWVDVVLEHGGCVTVMAQDKPTVDIELVTTTVSNMAEVRSYCYEASISDMASDSRCPTQGEAYLDKQSDTQYVCKRTLVDRGWGNGCGLFGKGSLVTCAKFTCSKKMTGKSIQPENLEYRIMLSVHGSQHSGMIGYETDGNRAKVEVTPNSPRAEATLGGFGSLGLDCEPRTGLDFSDLYYLTMNNKHWLVHKEWFHDIPLPWHAGADTGTPHWNNKEALVEFKDAHAKRQTVVVLGSQEGAVHTALAGALEAEMDGAKGKLFSGHLKCRLKMDKLRLMG

SEQ ID NO: 1502 - protein, 93 aa, Zika virus; identical to SEQ ID NO: 1482

SEQ ID NO: 1503 - protein, 97 aa, Zika virus; identical to SEQ ID NO: 1156

SEQ ID NO: 1504 - protein, 499 aa, Zika virus
IRCIGVSNRDFVEGMSGGTWVDVVLEHGGCVTVMAQDKPTVDIELVTTTVSNMAEVRSYCYEASISDMASDSRCPTQGEAYLDKQSDTQYVCKRTLVDRGWGNGCGLFGKGSLVTCAKFTCSKKMTGKSIQPENLEYRIMLSVHGSQHSGMIGYETDGRAKVEVTPNSPRAEATLGGFGSLGLDCEPRTGLDFSDLYYLTMNNKHWLVHKEWFHDIPLPWHAGADTGTPHWNNKEALVEFKDAHAKRQTVVVLGSQEGAVHTALAGALEAEMDGAKGKLFSGHLKCRLKMDKLRLKGVSYSLCTAAFTFTKVPAETLHGTVTVEVQYAGTDGPCKIPVQMAVDMQTLTPVGRLITANPVITESTENSKMMLELDPPFGDSYIVIGVGDKKITHHWYRSGSTIGKAFEATVRGAKRMAVLGDTAWDFGSVGGVFNSLGKGIHQIFGAAFKSLFGGMSWFSQILIGTLLVWLGLNTKNGSISLTCLALGGVMIFLSTAVSA

SEQ ID NO: 1505 - protein, 296 aa, Zika virus
RCIGVSNRDFVEGMSGGTWVDVVLEHGGCVTVMAQDKPTVDIELVTTTVSNMAEVRSYCYEASISDMASDSRCPTQGEAYLDKQSDTQYVCKRTLVDRGWGNGCGLFGKGSLVTCAKFTCSKKMTGKSIQPENLEYRIMLSVHGSQHSGMIGYETDGRAKVEVTPNSPRAEATLGGFGSLGLDCEPRTGLDFSDLYYLTMNNKHWLVHKEWFHDIPLPWHAGADTGTPHWNNKEALVEFKDAHAKRQTVVVLGSQEGAVHTALAGALEAEMDGAKGKLFSGHLKCRLKMDKLRLKG

SEQ ID NO: 1506 - protein, 93 aa, Zika virus; identical to SEQ ID NO: 1482

SEQ ID NO: 1507 - protein, 97 aa, Zika virus; identical to SEQ ID NO: 1156

SEQ ID NO: 1508 - protein, 500 aa, Zika virus; identical to SEQ ID NO: 1484

SEQ ID NO: 1509 - protein, 297 aa, Zika virus; identical to SEQ ID NO: 1481

SEQ ID NO: 1510 - protein, 93 aa, Zika virus; identical to SEQ ID NO: 1486

SEQ ID NO: 1511 - protein, 97 aa, Zika virus; identical to SEQ ID NO: 1156

SEQ ID NO: 1512 - protein, 500 aa, Zika virus; identical to SEQ ID NO: 1492

SEQ ID NO: 1513 - protein, 297 aa, Zika virus; identical to SEQ ID NO: 1392

SEQ ID NO: 1514 - protein, 93 aa, Zika virus; identical to SEQ ID NO: 1494

SEQ ID NO: 1515 - protein, 97 aa, Zika virus; identical to SEQ ID NO: 1156

SEQ ID NO: 1516 - protein, 500 aa, Zika virus; identical to SEQ ID NO: 1488

SEQ ID NO: 1517 - protein, 297 aa, Zika virus; identical to SEQ ID NO: 1489

SEQ ID NO: 1518 - protein, 93 aa, Zika virus; identical to SEQ ID NO: 1155

SEQ ID NO: 1519 - protein, 97 aa, Zika virus; identical to SEQ ID NO: 1156

SEQ ID NO: 1520 - protein, 500 aa, Zika virus; identical to SEQ ID NO: 1492

SEQ ID NO: 1521 - protein, 297 aa, Zika virus; identical to SEQ ID NO: 1392

SEQ ID NO: 1522 - protein, 93 aa, Zika virus; identical to SEQ ID NO: 1494

SEQ ID NO: 1523 - protein, 97 aa, Zika virus; identical to SEQ ID NO: 1156

SEQ ID NO: 1524 - protein, 500 aa, Zika virus; identical to SEQ ID NO: 1492

SEQ ID NO: 1525 - protein, 297 aa, Zika virus; identical to SEQ ID NO: 1392

SEQ ID NO: 1526 - protein, 93 aa, Zika virus; identical to SEQ ID NO: 1494

SEQ ID NO: 1527 - protein, 97 aa, Zika virus; identical to SEQ ID NO: 1156

SEQ ID NO: 1528 - protein, 500 aa, Zika virus
IRCIGVSNRDFVEGMSGGTWVDVVLEHGGCVTVMAQDKPTVDIELVTTTVSNMAEVRSYCYEASISDMASDSRCPTQGEAYLDKQSDTQYVCKRTLVDRGWGNGCGLFGKGSLVTCAKFTCSKKMTGKSIQPENLEYRIMLSVHGSQHSGMIGYETDGNRAKVEVTPNSPRAEATLGDFGSLGLDCEPRTGLDFSDLYYLTMNNKHWLVHKEWFHDIPLPWHAGADTGTPHWNNKEALVEFKDAHAKRQTVVVLGSQEGAVHTALAGALEAEMDGAKGKLFSGHLKCRLKMDKLRLKGVSYSLCTAAFTFTKVPAETLHGTVTVEVQYAGTDGPCKIPVQMAVDMQTLTPVGRLITANPVITESTENSKMMLELDPPFGDSYIVIGVGDKKITHHWHRSGSTIGKAFEATVRGAKRMAVLGDTAWDFGSVGGVFNSLGKGIHQIFGAAFKSLFGGMSWFSQILIGTLLVWLGLNTKNGSISLTCLALGGVMIFLSTAVSA

SEQ ID NO: 1529 - protein, 297 aa, Zika virus
RCIGVSNRDFVEGMSGGTWVDVVLEHGGCVTVMAQDKPTVDIELVTTTVSNMAEVRSYCYEASISDMASDSRCPTQGEAYLDKQSDTQYVCKRTLVDRGWGNGCGLFGKGSLVTCAKFTCSKKMTGKSIQPENLEYRIMLSVHGSQHSGMIGYETDGNRAKVEVTPNSPRAEATLGDFGSLGLDCEPRTGLDFSDLYYLTMNNKHWLVHKEWFHDIPLPWHAGADTGTPHWNNKEALVEFKDAHAKRQTVVVLGSQEGAVHTALAGALEAEMDGAKGKLFSGHLKCRLKMDKLRLKG

SEQ ID NO: 1530 - protein, 93 aa, Zika virus; identical to SEQ ID NO: 1155

SEQ ID NO: 1531 - protein, 97 aa, Zika virus; identical to SEQ ID NO: 1156

SEQ ID NO: 1532 - protein, 500 aa, Zika virus
IRCIGVSNRDFVEGMSGGTWVDVVLEHGGCVTVMAQDKPTVDIELVTTTVSNMAEVRSYCYEASISDMASDSRCPTQGEAYLDKQSDTQYVCKRTLVDRGWGNGCGLFGKGSLVTCAKFTCSKKMTGKSIQPENLEYRIMLSVHGSQHSGMIGYETDGNRAKVEVTPNSPRAEATLGGFGSLGLDCEPRTGLDFSDLYYLTMNNKHWLVHKEWFHDIPLPWHAGADTGTPHWNNKEALVEFKDAHAKRQTVVVLGSQEGAVHTALAGALEAEMDGAKGKLFSGHLKCRLKMDKLRLKGVSYSLCTAAFTFTKVPAETLHGTVTVEVQYAGTDGPCKIPVQMAVDMQTLTPVGRLITANPVITENTENSKMMLELDPPFGDSYIVIGVGDKKITHHWYRSGSTIGKAFEATVRGAKRMAVLGDTAWDFGSVGGVFNSLGKGIHQIFGAAFKSLFGGMSWFSQILIGTLLVWLGLNTKNGSISLTCLALGGVMIFLSTAVSA

SEQ ID NO: 1533 - protein, 297 aa, Zika virus; identical to SEQ ID NO: 1489

SEQ ID NO: 1534 - protein, 93 aa, Zika virus; identical to SEQ ID NO: 1486

SEQ ID NO: 1535 - protein, 97 aa, Zika virus; identical to SEQ ID NO: 1156

SEQ ID NO: 1536 - protein, 500 aa, Zika virus; identical to SEQ ID NO: 1500

SEQ ID NO: 1537 - protein, 297 aa, Zika virus; identical to SEQ ID NO: 1501

SEQ ID NO: 1538 - protein, 93 aa, Zika virus; identical to SEQ ID NO: 1482

SEQ ID NO: 1539 - protein, 97 aa, Zika virus; identical to SEQ ID NO: 1156

SEQ ID NO: 1540 - protein, 500 aa, Zika virus; identical to SEQ ID NO: 1484

SEQ ID NO: 1541 - protein, 297 aa, Zika virus; identical to SEQ ID NO: 1481

SEQ ID NO: 1542 - protein, 93 aa, Zika virus; identical to SEQ ID NO: 1486

SEQ ID NO: 1543 - protein, 97 aa, Zika virus; identical to SEQ ID NO: 1156

SEQ ID NO: 1544 - protein, 301 aa, Zika virus
RCIGVSNRDFVEGMSGGTWVDVVLEHGGCVTVMAQDKPTVDIELVTTTVSNMAEVRSYCYEASISDMASDSRCPTQGEAYLDKQSDTQYVCKRTLVDRGWGNGCGLFGKGSLVTCAKFACSKKMTGKSIQPENLEYRIMLSVHGSQHSGMIVNDTGHETDENRAKVEITPNSPRAEATLGGFGSLGLDCEPRTGLDFSDLYYLTMNNKHWLVHKEWFHDIPLPWHAGADTGTPHWNNKEALVEFKDAHAKRQTVVVLGSQEGAVHMALAGALEAEMDGAKGRLSSGHLKCRLKMDKLRLKG

SEQ ID NO: 1545 - protein, 93 aa, Zika virus; identical to SEQ ID NO: 1148

SEQ ID NO: 1546 - protein, 97 aa, Zika virus
GKAFEATVRGARRMAVLGDTAWDFGSVGGALNSLGKGIHQIFGAAFKSLFGGMSWFSQILIGTLLLWLGLNTKNGSISLMCLALGGVLIFLSTAVSA

SEQ ID NO: 1547 - protein, 500 aa, Zika virus
IRCIGVSNRDFVEGMSGGTWVDVVLEHGGCVTVMAQDKPTVDIELVTTTVSNMAEVRSYCYEASISDMASDSRCPTQGEAYLDNQSDTQYVCKRTLVDRGWGNGCGLFGKGSLVTCAKFTCSKKMTGKSIQPENLEYRIMLSVHGSQHSGMIGYETDENRAKVEVTPNSPRAEATLGGFGSLGLDCEPRTGLDFSDLYYLTMNNKHWLVHKEWFHDIPLPWHAGADTGTPHWNNKEALVEFKDAHAKRQTVVVLGSQEGAVHTALAGALEAEMDGAKGKLFSGHLKCRLKMDKLRLKGVSYSLCTAAFTFTKVPAETLHGTVTVEVQYAGTDGPCKIPVQMAVDMQTLTPVGRLITANPVITESTENSKMMLELDPPFGDSYIVIGVGDKKITHHWYRSGSTIGKAFEATVRGAKRMAVLGDTAWDFGSVGGVFNSLGKGIHQIFGAAFKSLFGGMSWFSQILIGTLLVWLGLNTKNGSISLTCLALGGVMIFLSTAVSA

SEQ ID NO: 1548 - protein, 297 aa, Zika virus
RCIGVSNRDFVEGMSGGTWVDVVLEHGGCVTVMAQDKPTVDIELVTTTVSNMAEVRSYCYEASISDMASDSRCPTQGEAYLDNQSDTQYVCKRTLVDRGWGNGCGLFGKGSLVTCAKFTCSKKMTGKSIQPENLEYRIMLSVHGSQHSGMIGYETDENRAKVEVTPNSPRAEATLGGFGSLGLDCEPRTGLDFSDLYYLTMNNKHWLVHKEWFHDIPLPWHAGADTGTPHWNNKEALVEFKDAHAKRQTVVVLGSQEGAVHTALAGALEAEMDGAKGKLFSGHLKCRLKMDKLRLKG

SEQ ID NO: 1549 - protein, 93 aa, Zika virus; identical to SEQ ID NO: 1482

SEQ ID NO: 1550 - protein, 97 aa, Zika virus; identical to SEQ ID NO: 1156

SEQ ID NO: 1551 - protein, 500 aa, Zika virus
IRCIGVSNRDFVEGMSGGTWVDVVLEHGGCVTVMAQDKPTVDIELVTTTVSNMAEVRSYCYEASISDMASDSRCPTQGEAYLDKQSDTQYVCKRTLVDRGWGNGCGLFGKGSLVTCAKFTCSKKMTGKSIQPENLEYRIMLSVHGSQHSGMIGYETDENRAKVEVTPNSPRAEATLGGFGSLGLDCEPRTGLDFSDLYYLTMNNKHWLVHKEWFHDIPLPWHAGADTGTPHWNNKEALVEFKDAHAKRQTVVVLGSQEGAVHTALAGALEAEMDGAKGKLFSGHLKCRLKMDKLRLKGVSYSLCTAAFTFTKVPAETLHGTVTVEVQYAGTDGPCKIPVQMAVDMQTLTPVGRLITANPVITESTENSKMMLELDPPFGDSYIVIGVGDKKITHHWHRSGSTIGKAFEATVRGAKRMAVLGDTAWDFGSVGGVFNSLGKGIHQIFGAAFKSLFGGMSWFSQILIGTLLVWLGLNTKNGSISLTCLALGGVMIFLSTAVSA

SEQ ID NO: 1552 - protein, 297 aa, Zika virus; identical to SEQ ID NO: 1392

SEQ ID NO: 1553 - protein, 93 aa, Zika virus; identical to SEQ ID NO: 1155

SEQ ID NO: 1554 - protein, 97 aa, Zika virus; identical to SEQ ID NO: 1156

SEQ ID NO: 1555 - protein, 500 aa, Zika virus
IRCIGVSNRDFVEGMSGGTWVDVVLEHGGCVTVMAQDKPTVDIELVTTTVSNMAEVRSYCYEASISDIASDSRCPTQGEAYLDNQSDTQYVCKRTLVDRGWGNGCGLFGKGSLVTCAKFTCSKKMTGKSIQPENLEYRIMLSVHGSQHSGMIGYETDENRAKVEVTPNSPRAEATLGGFGSLGLDCEPRTGLDFSDLYYLTMNNKHWLVHKEWFHDIPLPWHAGADTGTPHWNNKEALVEFKDAHAKRQTVVVLGSQEGAVHTALAGALEAEMDGAKGKLFSGHLKCRLKMDKLRLKGVSYSLCTAAFTFTKVPAETLHGTVTVEVQYAGTDGPCKIPVQMAVDMQTLTPVGRLITANPVITESTENSKMMLELDPPFGDSYIVIGVGDKKITHHWYRSGSTIGKAFEATVRGAKRMAVLGDTAWDFGSVGGVFNSLGKGIHQIFGAAFKSLFGGMSWLSQILIGTLLVWLGLNTKNGSISLTCLALGGVMIFLSTAVSA

SEQ ID NO: 1556 - protein, 297 aa, Zika virus
RCIGVSNRDFVEGMSGGTWVDVVLEHGGCVTVMAQDKPTVDIELVTTTVSNMAEVRSYCYEASISDIASDSRCPTQGEAYLDNQSDTQYVCKRTLVDRGWGNGCGLFGKGSLVTCAKFTCSKKMTGKSIQPENLEYRIMLSVHGSQHSGMIGYETDENRAKVEVTPNSPRAEATLGGFGSLGLDCEPRTGLDFSDLYYLTMNNKHWLVHKEWFHDIPLPWHAGADTGTPHWNNKEALVEFKDAHAKRQTVVVLGSQEGAVHTALAGALEAEMDGAKGKLFSGHLKCRLKMDKLRLKG

SEQ ID NO: 1557 - protein, 93 aa, Zika virus; identical to SEQ ID NO: 1482

SEQ ID NO: 1558 - protein, 97 aa, Zika virus
GKAFEATVRGAKRMAVLGDTAWDFGSVGGVFNSLGKGIHQIFGAAFKSLFGGMSWLSQILIGTLLVWLGLNTKNGSISLTCLALGGVMIFLSTAVSA

SEQ ID NO: 1559 - protein, 500 aa, Zika virus
IRCIGVSNRDFVEGMSGGTWVDVVLEHGGCVTVMAQDKPTVDIELVTTTVSNMAEVRSYCYEASISDMASDSRCPTQGEAYLDKQSDTQYVCKRTLVDRGWGNGCGLFGKGSLVTCAKFTCSKKMTGKSIQPENLEYRIMLSVHGSQHSGMIGYETDENRAKVEVTPNSPRAEATLGGFGSLGLDCEPRTGLDFSDLYYLTMNNKHWLVHKEWFHDIPLPWHAGADTGTPHWNNKEALVEFKDAHAERQTVVVLGSQEGAVHTALAGALEAEMDGAKGKLFSGHLKCRLKMDKLRLKGVSYSLCTAAFTFTKVPAETLHGTVTVEVQYAGTDGPCKIPVQMAVDMQTLTPVGRLITANPVITESTENSKMMLELDPPFGDSYIVIGVGDKKITHHWYRSGSTIGKAFEATVRGAKRMAVLGDTAWDFGSVGGVFNSLGKGIHQIFGAAFKSLFGGMSWFSQILIGTLLVWLGLNTKNGSISLTCLALGGVMIFLSTAVSA

SEQ ID NO: 1560 - protein, 297 aa, Zika virus
RCIGVSNRDFVEGMSGGTWVDVVLEHGGCVTVMAQDKPTVDIELVTTTVSNMAEVRSYCYEASISDMASDSRCPTQGEAYLDKQSDTQYVCKRTLVDRGWGNGCGLFGKGSLVTCAKFTCSKKMTGKSIQPENLEYRIMLSVHGSQHSGMIGYETDENRAKVEVTPNSPRAEATLGGFGSLGLDCEPRTGLDFSDLYYLTMNNKHWLVHKEWFHDIPLPWHAGADTGTPHWNNKEALVEFKDAHAERQTVVVLGSQEGAVHTALAGALEAEMDGAKGKLFSGHLKCRLKMDKLRLKG

SEQ ID NO: 1561 - protein, 93 aa, Zika virus; identical to SEQ ID NO: 1482

SEQ ID NO: 1562 - protein, 97 aa, Zika virus; identical to SEQ ID NO: 1156

SEQ ID NO: 1563 - protein, 500 aa, Zika virus
IRCIGVSNRDFVEGMSGGTWVDVVLEHGGCVTVMAQDKPTVDIELVTTTVSNMAEVRSYCYEASISDMASDSRCPTQGEAYLDKQSDTQYVCKRTLVDRGWGNGCGLFGKGSLVTCAKFTCSKKMTGKSIQPENLEYRIMLSVHGSQHSGMIGYETDENRVKVEVTPNSPRAEATLGGFGSLGLDCEPRTGLDFSDLYYLTMNNKHWLVHKEWFHDIPLPWHAGADTGTPHWNNKEALVEFKDAHAKRQTVVVLGSQEGAVHTALAGALEAEMDGAKGKLFSGHLKCRLKMDKLRLKGVSYSLCTAAFTFTKVPAETLHGTVTVEVQYAGTDGPCKIPVQMAVDMQTLTPVGRLITANPVITESTENSKMMLELDPPFGDSYIVIGVGDKKITHHWHRSGSTIGKAFEATVRGAKRMAVLGDTAWDFGSVGGVFNSLGKGIHQIFGAAFKSLFGGMSWFSQILIGTLLVWLGLNTKNGSISLTCLALGGVMIFLSTAVSA

SEQ ID NO: 1564 - protein, 297 aa, Zika virus
RCIGVSNRDFVEGMSGGTWVDVVLEHGGCVTVMAQDKPTVDIELVTTTVSNMAEVRSYCYEASISDMASDSRCPTQGEAYLDKQSDTQYVCKRTLVDRGWGNGCGLFGKGSLVTCAKFTCSKKMTGKSIQPENLEYRIMLSVHGSQHSGMIGYETDENRVKVEVTPNSPRAEATLGGFGSLGLDCEPRTGLDFSDLYYLTMNNKHWLVHKEWFHDIPLPWHAGADTGTPHWNNKEALVEFKDAHAKRQTVVVLGSQEGAVHTALAGALEAEMDGAKGKLFSGHLKCRLKMDKLRLKG

SEQ ID NO: 1565 - protein, 93 aa, Zika virus; identical to SEQ ID NO: 1155

SEQ ID NO: 1566 - protein, 97 aa, Zika virus; identical to SEQ ID NO: 1156

SEQ ID NO: 1567 - protein, 500 aa, Zika virus
IRCIGVSNRDFVEGMSGGTWVDVVLEHGGCVTVMAQDKPTVDIELVTTTVSNMAEVRSYCYEASISDMASDSRCPTQGEAYLDNQSDTQYVCKRTLVDRGWGNGCGLFGKGSLVTCAKFTCSKKMTGKSIQPENLEYRIMLSVHGSQHSGMIGYETDENRAKVEVTPNSPRAEATLGGFGSLGLDCEPRTGLDFSDLYYLTMNNKHWLVHKEWFHDIPLPWHAGADTGTPHWNNKEALVEFKDAHAKRQTVVVLGSQEGAVHTALAGALEAEMDGAKGKLFSGHLKCRLKMDKLRLKGVSYSLCTAAFTFTKVPAETLHGTVTVEVQYAGTDGPCKIPVQMAVDMQTLTPVGRLITANPVITESTENSKMMLELDPPFGDSYIVIGVGDKKITHHWYRSGSTIGKAFEATVRGAKRMAVLGDTAWDFGSVGGVFNSLGKGIHQIFGAAFKSLFGGMSWFSQILIGTLLVWLGLNTKNGSISLTCLALGGVVIFLSTAVSA

SEQ ID NO: 1568 - protein, 297 aa, Zika virus; identical to SEQ ID NO: 1548

SEQ ID NO: 1569 - protein, 93 aa, Zika virus; identical to SEQ ID NO: 1482

SEQ ID NO: 1570 - protein, 97 aa, Zika virus
GKAFEATVRGAKRMAVLGDTAWDFGSVGGVFNSLGKGIHQIFGAAFKSLFGGMSWFSQILIGTLLVWLGLNTKNGSISLTCLALGGVVIFLSTAVSA

SEQ ID NO: 1571 - protein, 500 aa, Zika virus
IRCIGVSNRDFVEGMSGGTWVDVVLEHGGCVTVMAQDKPTVDIELVTTTVSNMAEVRSYCYEASISDMVSDSRCPTQGEAYLDKQSDTQYVCKRTLVDRGWGNGCGLFGKGSLVTCAKFTCSKKMTGKSIQPENLEYRIMLSVHGSQHSGMIGYETDENRAKVEVTPNSPRAEATLGGFGSLGLDCEPRTGLDFSDLYYLTMNNKHWLVHKEWFHDIPLPWHAGADTGTPHWNNKEALVEFKDAHAKRQTVVVLGSQEGAVHTALAGALEAEMDDAKGKLFSGHLKCRLKMDKLRLKGVSYSLCTAAFTFTKVPAETLHGTVTVEVQYAGTDGPCKIPVQMAVDMQTLTPVGRLITANPVITESTENSKMMLELDPPFGDSYIVIGVGDKKITHHWHRSGSTIGKAFEATVRGAKRMAVLGDTAWDFGSVGGVFNSLGKGIHQIFGAAFKSLFGGMSWFSQILIGTLLVWLGLNTKNGSISLTCLALGGVMIFLSTAVSA

SEQ ID NO: 1572 - protein, 297 aa, Zika virus
RCIGVSNRDFVEGMSGGTWVDVVLEHGGCVTVMAQDKPTVDIELVTTTVSNMAEVRSYCYEASISDMVSDSRCPTQGEAYLDKQSDTQYVCKRTLVDRGWGNGCGLFGKGSLVTCAKFTCSKKMTGKSIQPENLEYRIMLSVHGSQHSGMIGYETDENRAKVEVTPNSPRAEATLGGFGSLGLDCEPRTGLDFSDLYYLTMNNKHWLVHKEWFHDIPLPWHAGADTGTPHWNNKEALVEFKDAHAKRQTVVVLGSQEGAVHTALAGALEAEMDDAKGKLFSGHLKCRLKMDKLRLKG

SEQ ID NO: 1573 - protein, 93 aa, Zika virus; identical to SEQ ID NO: 1155

SEQ ID NO: 1574 - protein, 97 aa, Zika virus; identical to SEQ ID NO: 1156

SEQ ID NO: 1575 - protein, 500 aa, Zika virus
IRCIGVSNRDFVEGMSGGTWVDVVLEHGGCVTVMAQDKPTVDIELVTTTVSNMAEVRSYCYEASISDMASDSRCPTQGEAYLDEQSDTQYVCKRTLVDRGWGNGCGLFGKGSLVTCAKFTCSKKMTGKSIQPENLEYRIMLSVHGSQHSGMIGYETDENRATVEVTPNSPRAEATLGGFGSLGLDCEPRTGLDFSDLYYLTMNNKHWLVHKEWFHDIPLPWHAGADTGTPHWNNKEALVEFKDAHAKRQTVVVLGSQEGAVHTALAGALEAEMDGAKGKLFSGHLKCRLKMDKLRLKGVSYSLCTAAFTFTKVPAETLHGTVTVEVQYAGTDGPCKIPVQMAVDMQTLTPVGRLITANPVITESTENSKMMLELDPPFGDSYIVIGVGDKKITHHWHRSGSTIGKAFEATVRGAKRMAVLGDTAWDFGSVGGVFNSLGKGIHQIFGAAFKSLFGGMSWFSQILIGTLLVWLGLNTKNGSISLTCLALGGVMIFLSTAVSA

SEQ ID NO: 1576 - protein, 297 aa, Zika virus
RCIGVSNRDFVEGMSGGTWVDVVLEHGGCVTVMAQDKPTVDIELVTTTVSNMAEVRSYCYEASISDMASDSRCPTQGEAYLDEQSDTQYVCKRTLVDRGWGNGCGLFGKGSLVTCAKFTCSKKMTGKSIQPENLEYRIMLSVHGSQHSGMIGYETDENRATVEVTPNSPRAEATLGGFGSLGLDCEPRTGLDFSDLYYLTMNNKHWLVHKEWFHDIPLPWHAGADTGTPHWNNKEALVEFKDAHAKRQTVVVLGSQEGAVHTALAGALEAEMDGAKGKLFSGHLKCRLKMDKLRLKG

SEQ ID NO: 1577 - protein, 93 aa, Zika virus; identical to SEQ ID NO: 1155

SEQ ID NO: 1578 - protein, 97 aa, Zika virus; identical to SEQ ID NO: 1156

SEQ ID NO: 1579 - protein, 500 aa, Zika virus
IRCIGVSNRDFVEGMSGGTWVDVVLEHGGCVTVMAQDKPTVDIELVTTTVSNMAEVRSYCYEASISDVVSDSRCPTQGEAYLDKQSDTQYVCKRTLVDRGWGNGCGLFGKGSLVTCAKFTCSKKMTGKSIQPENLEYRIMLSVHGSQHSGMIGYETDENRAKVEVTPNSPRAEATLGGFGSLGLDCEPRTGLDFSDLYYLTMNNKHWLVHKEWFHDIPLPWHAGADTGTPHWNNKEALVEFKDAHAKRQTVVVLGSQEGAVHTALAGALEAEMDGAKGKLFSGHLKCRLKMDKLRLKGVSYSLCTAAFTFTKVPAETLHGTVTVEVQYAGTDGPCKIPVQMAVDMQTLTPVGRLITANPVITESTENSKMMLELDPPFGDSYIVIGVGDKKITHHWHRSGSTIGKAFEATVRGAKRMAVLGDTAWDFGSVGGVFNSLGKGIHQIFGAAFKSLFGGMSWFSQILIGTLLVWLGLNTKNGSISLTCLALGGVMIFLSTAVSA

SEQ ID NO: 1580 - protein, 297 aa, Zika virus
RCIGVSNRDFVEGMSGGTWVDVVLEHGGCVTVMAQDKPTVDIELVTTTVSNMAEVRSYCYEASISDVVSDSRCPTQGEAYLDKQSDTQYVCKRTLVDRGWGNGCGLFGKGSLVTCAKFTCSKKMTGKSIQPENLEYRIMLSVHGSQHSGMIGYETDENRAKVEVTPNSPRAEATLGGFGSLGLDCEPRTGLDFSDLYYLTMNNKHWLVHKEWFHDIPLPWHAGADTGTPHWNNKEALVEFKDAHAKRQTVVVLGSQEGAVHTALAGALEAEMDGAKGKLFSGHLKCRLKMDKLRLKG

SEQ ID NO: 1581 - protein, 93 aa, Zika virus; identical to SEQ ID NO: 1155

SEQ ID NO: 1582 - protein, 97 aa, Zika virus; identical to SEQ ID NO: 1156

SEQ ID NO: 1583 - protein, 500 aa, Zika virus
IRCIGVSNRDFVEGMSGGTWVDVVLEHGGCVTVMAQDKPTVDIELVTTTVSNMAEVRSYCYEASISDMASDSRCPTQGEAYLDKQSDTQYVCKRTLVDRGWGNGCGLFGKGSLVTCARFTCSKKMTGKSIQPENLEYRIMLSVHGSQHSGMIGYETDENGAKVEVTPNSPRAEATLGGFGSLGLDCEPRTGLDFSDLYYLTMNNKHWLVHKEWFHDIPLPWHAGADTGTPHWNNKEALVEFKDAHAKRQTVVVLGSQEGAVHTALAGALEAEMDGAKGKLFSGHLKCRLKMDKLRLKGVSYSLCTAAFTFTKVPAETLHGTVTVEVQYAGTDGPCKIPVQMAVDMQTLTPVGRLITANPVITESTENSKMMLELDPPFGDSYIVIGVGDKKITHHWHRSGSTIGKAFEATVRGAKRMAVLGDTAWDFGSVGGVFNSLGKGIHQIFGAAFKLLFGGMSWFSQILIGTLLVWLGLNTKNGSISLTCLALGGVMIFLSTAVSA

SEQ ID NO: 1584 - protein, 297 aa, Zika virus
RCIGVSNRDFVEGMSGGTWVDVVLEHGGCVTVMAQDKPTVDIELVTTTVSNMAEVRSYCYEASISDMASDSRCPTQGEAYLDKQSDTQYVCKRTLVDRGWGNGCGLFGKGSLVTCARFTCSKKMTGKSIQPENLEYRIMLSVHGSQHSGMIGYETDENGAKVEVTPNSPRAEATLGGFGSLGLDCEPRTGLDFSDLYYLTMNNKHWLVHKEWFHDIPLPWHAGADTGTPHWNNKEALVEFKDAHAKRQTVVVLGSQEGAVHTALAGALEAEMDGAKGKLFSGHLKCRLKMDKLRLKG

SEQ ID NO: 1585 - protein, 93 aa, Zika virus; identical to SEQ ID NO: 1155

SEQ ID NO: 1586 - protein, 97 aa, Zika virus
GKAFEATVRGAKRMAVLGDTAWDFGSVGGVFNSLGKGIHQIFGAAFKLLFGGMSWFSQILIGTLLVWLGLNTKNGSISLTCLALGGVMIFLSTAVSA

SEQ ID NO: 1587 - protein, 500 aa, Zika virus; identical to SEQ ID NO: 1551

SEQ ID NO: 1588 - protein, 297 aa, Zika virus; identical to SEQ ID NO: 1392

SEQ ID NO: 1589 - protein, 93 aa, Zika virus; identical to SEQ ID NO: 1155

SEQ ID NO: 1590 - protein, 97 aa, Zika virus; identical to SEQ ID NO: 1156

SEQ ID NO: 1591 - protein, 500 aa, Zika virus; identical to SEQ ID NO: 1559

SEQ ID NO: 1592 - protein, 297 aa, Zika virus; identical to SEQ ID NO: 1560

SEQ ID NO: 1593 - protein, 93 aa, Zika virus; identical to SEQ ID NO: 1482

SEQ ID NO: 1594 - protein, 97 aa, Zika virus; identical to SEQ ID NO: 1156

SEQ ID NO: 1595 - protein, 500 aa, Zika virus; identical to SEQ ID NO: 1559

SEQ ID NO: 1596 - protein, 297 aa, Zika virus; identical to SEQ ID NO: 1560

SEQ ID NO: 1597 - protein, 93 aa, Zika virus; identical to SEQ ID NO: 1482

SEQ ID NO: 1598 - protein, 97 aa, Zika virus; identical to SEQ ID NO: 1156

SEQ ID NO: 1599 - protein, 500 aa, Zika virus
IRCIGVSNRDFVEGMSGGTWVDVVLEHGGCVTVMAQDKPTVDIELVTTTVSNMAEVRSYCYEASISDMASDSRCPTQGEAYLDKQSDTQYVCKRTLVDRGWGNGCGLFGKGSLVTCAKFTCSKKMTGKSIQPENLEYRIMLSVHGSQHSEMIGYETDENRAKVEVTPNSPRAEATLGGFGSLGLDCEPRTGLDFSDLYYLTMNNKHWLVHKEWFHDIPLPWHAGADTGTPHWNNKEALVEFKDAHAKRQNVVVLGSQEGAVYTALAGALEAEMDGAKGKLFSGHLKCRLKMDKLRLKGVSYSLCTAAFTFTKVPAETLHGTVTVEVQYAGTDGPCKIPVQMAVDMQTLTPVGRLITANPVITESTENSKMMLELDPPFGDSYIVIGVGDKKITHHWYRSGSTIGKAFEATVRGAKRMAVLGDTAWDFGSVGGVFNSLGKGIHQIFGAAFKSLFGGMSWFSQILIGTLLVWLGLNTKNGSISLTCLALGGVMIFLSTAVSA

SEQ ID NO: 1600 - protein, 297 aa, Zika virus
RCIGVSNRDFVEGMSGGTWVDVVLEHGGCVTVMAQDKPTVDIELVTTTVSNMAEVRSYCYEASISDMASDSRCPTQGEAYLDKQSDTQYVCKRTLVDRGWGNGCGLFGKGSLVTCAKFTCSKKMTGKSIQPENLEYRIMLSVHGSQHSEMIGYETDENRAKVEVTPNSPRAEATLGGFGSLGLDCEPRTGLDFSDLYYLTMNNKHWLVHKEWFHDIPLPWHAGADTGTPHWNNKEALVEFKDAHAKRQNVVVLGSQEGAVYTALAGALEAEMDGAKGKLFSGHLKCRLKMDKLRLKG

SEQ ID NO: 1601 - protein, 93 aa, Zika virus; identical to SEQ ID NO: 1482

SEQ ID NO: 1602 - protein, 97 aa, Zika virus; identical to SEQ ID NO: 1156

SEQ ID NO: 1603 - protein, 500 aa, Zika virus
IRCIGVSNRDFVEGMSGGTWVDVVLEHGGCVTVMAQDKPTVDIELVTTTVSNMAEVRSYCYEASISDMASDSRCPTQGEAYLDKQSDTQYVCKRTLVDRGWGNGCGLFGKGSLVTCAKFTCSKKMTGKSIQPENLEYRIMLSVHGSQHSGMIGYETGENRAKVEVTPNSPRAEATLGGFGSLGLDCEPRTGLDFSDLYYLTMNNKHWLVHKEWFHDIPLPWHAGADTGTPHWNNKEALVEFKDAHAKRQTVVVLGSQEGAVHTALAGALEAEMDGAKGKLFSGHLKCRLKMDKLRLKGVSYSLCTAAFTFTKVPAETLHGTVTVEVQYAGTDGPCKIPVQMAVDMQTLTPVGRLITANPVITESTENSKMMLELDPPFGDSYIVIGVGDKKITHHWYRSGSTIGKAFEATVRGAKRMAVLGDTAWDFGSVGGVFNSLGKGIHQIFGAAFKSLFGGMSWFSQILIGTLLVWLGLNTKNGSISLTCLALGGVMIFLSTAVSA

SEQ ID NO: 1604 - protein, 297 aa, Zika virus
RCIGVSNRDFVEGMSGGTWVDVVLEHGGCVTVMAQDKPTVDIELVTTTVSNMAEVRSYCYEASISDMASDSRCPTQGEAYLDKQSDTQYVCKRTLVDRGWGNGCGLFGKGSLVTCAKFTCSKKMTGKSIQPENLEYRIMLSVHGSQHSGMIGYETGENRAKVEVTPNSPRAEATLGGFGSLGLDCEPRTGLDFSDLYYLTMNNKHWLVHKEWFHDIPLPWHAGADTGTPHWNNKEALVEFKDAHAKRQTVVVLGSQEGAVHTALAGALEAEMDGAKGKLFSGHLKCRLKMDKLRLKG

SEQ ID NO: 1605 - protein, 93 aa, Zika virus; identical to SEQ ID NO: 1482

SEQ ID NO: 1606 - protein, 97 aa, Zika virus; identical to SEQ ID NO: 1156

SEQ ID NO: 1607 - protein, 500 aa, Zika virus; identical to SEQ ID NO: 1583

SEQ ID NO: 1608 - protein, 297 aa, Zika virus; identical to SEQ ID NO: 1584

SEQ ID NO: 1609 - protein, 93 aa, Zika virus; identical to SEQ ID NO: 1155

SEQ ID NO: 1610 - protein, 97 aa, Zika virus; identical to SEQ ID NO: 1586

SEQ ID NO: 1611 - protein, 500 aa, Zika virus
IRCIGVSNRDFVEGMSGGTWVDVVLEHGGCVTVMAQDKPTVDIELVTTTVSNMAEVRSYCYEASISDMATDSRCPTQGEAYLDKQSDTQYVCKRTLVDRGWGNGCGLFGKGSLVTCAKFTCSKKMTGKSIQPENLEYRIMLSVHGSQHSGMIGYETDENRAKVEVTPNSPRAEATLGGFGSLGLDCEPRTGLDFSDLYYLTMNNKHWLVHKEWFHDIPLPWHAGADTGTPHWNNKEALVEFKDAHAKRQTVVVLGSQEGAVHTALAGALEAEMDGAKGKLFSGHLKCRLKMDKLRLKGVSYSLCTAAFTFTKVPAETLHGTVTVEVQYAGTDGPCKIPVQMAVDMQTLTPVGRLITANPVITESTENSKMMLELDPPFGDSYIVIGVGDKKITHHWHRSGSTIGKAFEATVRGAKRMAVLGDTAWDFGSVGGVFNSLGKGIHQIFGAAFKLLFGGMSWFSQILIGTLLVWLGLNTKNGSISLTCLALGGVMIFLSTAVSA

SEQ ID NO: 1612 - protein, 297 aa, Zika virus
RCIGVSNRDFVEGMSGGTWVDVVLEHGGCVTVMAQDKPTVDIELVTTTVSNMAEVRSYCYEASISDMATDSRCPTQGEAYLDKQSDTQYVCKRTLVDRGWGNGCGLFGKGSLVTCAKFTCSKKMTGKSIQPENLEYRIMLSVHGSQHSGMIGYETDENRAKVEVTPNSPRAEATLGGFGSLGLDCEPRTGLDFSDLYYLTMNNKHWLVHKEWFHDIPLPWHAGADTGTPHWNNKEALVEFKDAHAKRQTVVVLGSQEGAVHTALAGALEAEMDGAKGKLFSGHLKCRLKMDKLRLKG

SEQ ID NO: 1613 - protein, 93 aa, Zika virus; identical to SEQ ID NO: 1155

SEQ ID NO: 1614 - protein, 97 aa, Zika virus; identical to SEQ ID NO: 1586

SEQ ID NO: 1615 - protein, 500 aa, Zika virus
IRCIGVSNRDFVEGMSGGTWVDVVLEHGGCVTVMAQDKPTVDIELVTTTVSNMAEVRSYCYEASISDMATDSRCPTQGEAYLDKQSDTQYVCKRTLVDRGWGNGCGLFGKGSLVTCAKFTCSKKMTGKSIQPENLEYRIMLSVHGSQHSGMIGYETDENRAKVEVTPNSPRAEATLGGFGSLGLDCEPRTGLDFSDLYYLTMNNKHWLVHKEWFHDIPLPWHAGADTGTPHWNNKEALVEFKDAHAKRQTVVVLGSQEGAVHTALAGALEAEMDGAKGKLFSGHLKCRLKMDKLRLKGVSYSLCTAAFTFTKVPAETLHGTVTVEVQYAGTDGPCKIPVQMAVDMQTLTPVGRLITANPVITESTENSKMMLELDPPFGDSYIVIGVGDKKITHHWYRSGSTIGKAFEATVRGAKRMAVLGDTAWDFGSVGGVFNSLGKGIHQIFGAAFKSLFGGMSWFSQILIGTLLVWLGLNTKNGSISLTCLALGGVMIFLSTAVSA

SEQ ID NO: 1616 - protein, 297 aa, Zika virus; identical to SEQ ID NO: 1612

SEQ ID NO: 1617 - protein, 93 aa, Zika virus; identical to SEQ ID NO: 1482

SEQ ID NO: 1618 - protein, 97 aa, Zika virus; identical to SEQ ID NO: 1156

SEQ ID NO: 1619 - protein, 500 aa, Zika virus
IRCIGVSNRDFVEGMSGGTWVDVVLEHGGCVTVMAQDKPTVDIELVTTTVSNMAEVRSYCYEASISDMASDSRCPTQGEAYLENQSDTQYVCKRTLVDRGWGNGCGLFGKGSLVTCAKFTCSKKMTGKSIQPENLEYRIMLSVHGSQHSGMIGYETDENRAKVEVTPNSPRAEATLGGFGSLGLDCEPRTGLDFSDLYYLTMNNKHWLVHKEWFHDIPLPWHAGADTGTPHWNNKEALVEFKDAHAKRQTVVVLGSQEGAVHTALAGALEAEMDGAKGKLFSGHLKCRLKMDKLRLKGVSYSLCTAAFTFTKVPAETLHGTVTVEVQYAGTDGPCKIPVQMAVDMQTLTPVGRLITANPVITESTENSKMMLELDPPFGDSYIVIGVGDKKITHHWYRSGSTIGKAFEATVRGAKRMAVLGDTAWDFGSVGGVFNSLGKGIHQIFGAAFKSLFGGMSWFSQILIGTLLVWLGLNTKNGSISLTCLALGGVMIFLSTAVSA

SEQ ID NO: 1620 - protein, 297 aa, Zika virus
RCIGVSNRDFVEGMSGGTWVDVVLEHGGCVTVMAQDKPTVDIELVTTTVSNMAEVRSYCYEASISDMASDSRCPTQGEAYLENQSDTQYVCKRTLVDRGWGNGCGLFGKGSLVTCAKFTCSKKMTGKSIQPENLEYRIMLSVHGSQHSGMIGYETDENRAKVEVTPNSPRAEATLGGFGSLGLDCEPRTGLDFSDLYYLTMNNKHWLVHKEWFHDIPLPWHAGADTGTPHWNNKEALVEFKDAHAKRQTVVVLGSQEGAVHTALAGALEAEMDGAKGKLFSGHLKCRLKMDKLRLKG

SEQ ID NO: 1621 - protein, 93 aa, Zika virus; identical to SEQ ID NO: 1482

SEQ ID NO: 1622 - protein, 97 aa, Zika virus; identical to SEQ ID NO: 1156

SEQ ID NO: 1623 - protein, 500 aa, Zika virus; identical to SEQ ID NO: 1571

SEQ ID NO: 1624 - protein, 297 aa, Zika virus; identical to SEQ ID NO: 1572

SEQ ID NO: 1625 - protein, 93 aa, Zika virus; identical to SEQ ID NO: 1155

SEQ ID NO: 1626 - protein, 97 aa, Zika virus; identical to SEQ ID NO: 1156

SEQ ID NO: 1627 - protein, 500 aa, Zika virus; identical to SEQ ID NO: 1615

SEQ ID NO: 1628 - protein, 297 aa, Zika virus; identical to SEQ ID NO: 1612

SEQ ID NO: 1629 - protein, 93 aa, Zika virus; identical to SEQ ID NO: 1482

SEQ ID NO: 1630 - protein, 97 aa, Zika virus; identical to SEQ ID NO: 1156

SEQ ID NO: 1631 - protein, 500 aa, Zika virus; identical to SEQ ID NO: 1559

SEQ ID NO: 1632 - protein, 297 aa, Zika virus; identical to SEQ ID NO: 1560

SEQ ID NO: 1633 - protein, 93 aa, Zika virus; identical to SEQ ID NO: 1482

SEQ ID NO: 1634 - protein, 97 aa, Zika virus; identical to SEQ ID NO: 1156

SEQ ID NO: 1635 - protein, 500 aa, Zika virus; identical to SEQ ID NO: 1599

SEQ ID NO: 1636 - protein, 297 aa, Zika virus; identical to SEQ ID NO: 1600

SEQ ID NO: 1637 - protein, 93 aa, Zika virus; identical to SEQ ID NO: 1482

SEQ ID NO: 1638 - protein, 97 aa, Zika virus; identical to SEQ ID NO: 1156

SEQ ID NO: 1639 - protein, 500 aa, Zika virus; identical to SEQ ID NO: 1567

SEQ ID NO: 1640 - protein, 297 aa, Zika virus; identical to SEQ ID NO: 1548

SEQ ID NO: 1641 - protein, 93 aa, Zika virus; identical to SEQ ID NO: 1482

SEQ ID NO: 1642 - protein, 97 aa, Zika virus; identical to SEQ ID NO: 1570

SEQ ID NO: 1643 - protein, 500 aa, Zika virus
IRCIGVSNRDFVEGMSGGTWVDVVLEHGGCVTVMAQDKPTVDIELVTTTVSNMAEVRSYCYEASISDMASDSRCPTQGEAYLDKQSDTQYVCKRTLVDRGWGNGCGLFGKGSLVTCAKFTCSKKMTGKSIQPENLEYRIMLSVHGSQHSGMIGYETDKNRAKVEVTPNSPRAEATLGGFGSLGLDCEPRTGLDFSDLYYLTMNNKHWLVHKEWFHDIPLPWHAGADTGTPHWNNKEALVEFKDAHAKRQTVVVLGSQEGAVHTALAGALEAEMDGAKGKLFSGHLKCRLKMDKLRLKGVSYSLCTAAFTFTKVPAETLHGTVTVEVQYAGTDGPCKIPVQMAVDMQTLTPVGRLITANPVITESTENSKMMLELDPPFGDSYIVIGVGDKKITHHWHRSGSTIGKAFEATVRGAKRMAVLGDTAWDFGSVGGVFNSLGKGIHQIFGAAFKSLFGGMSWFSQILIGTLLVWLGLNTKNGSISLTCLALGGVMIFLSTAVSA

SEQ ID NO: 1644 - protein, 297 aa, Zika virus
RCIGVSNRDFVEGMSGGTWVDVVLEHGGCVTVMAQDKPTVDIELVTTTVSNMAEVRSYCYEASISDMASDSRCPTQGEAYLDKQSDTQYVCKRTLVDRGWGNGCGLFGKGSLVTCAKFTCSKKMTGKSIQPENLEYRIMLSVHGSQHSGMIGYETDKNRAKVEVTPNSPRAEATLGGFGSLGLDCEPRTGLDFSDLYYLTMNNKHWLVHKEWFHDIPLPWHAGADTGTPHWNNKEALVEFKDAHAKRQTVVVLGSQEGAVHTALAGALEAEMDGAKGKLFSGHLKCRLKMDKLRLKG

SEQ ID NO: 1645 - protein, 93 aa, Zika virus; identical to SEQ ID NO: 1155

SEQ ID NO: 1646 - protein, 97 aa, Zika virus; identical to SEQ ID NO: 1156

SEQ ID NO: 1647 - protein, 500 aa, Zika virus
IRCIGVSNRDFVEGMSGGTWVDVVLEHGGCVTVMAQDKPTVDIELVTTTVSNMAEVRSYCYEASISDMTSDSRCPTQGEAYLDKQSDTQYVCKRTLVDRGWGNGCGLFGKGSLVTCAKFTCSKKMTGKSIQPENLEYRIMLSVHGSQHSGMIGYETDENRAEVEVTPNSPRAEATLGGFGSLGLDCEPRTGLDFSDLYYLTMNNKHWLVHKEWFHDIPLPWHAGADTGTPHWNNKEALVEFKDAHAKRQTVVVLGSQEGAVHTALAGALEAEMDGAKGKLFSGHLKCRLKMDKLRLKGVSYSLCTAAFTFTKVPAETLHGTVTVEVQYAGTDGPCKIPVQMAVDMQTLTPVGRLITANPVITESTENSKMMLELDPPFGDSYIVIGVGDKKITHHWHRSGSTIGKAFEATVRGAKRMAVLGDTAWDFGSVGGVFNSLGKGIHQIFGAAFKSLFGGMSWFSQILIGTLLVWLGLNTKNGSISLTCLALGGVMIFLSTAVSA

SEQ ID NO: 1648 - protein, 297 aa, Zika virus
RCIGVSNRDFVEGMSGGTWVDVVLEHGGCVTVMAQDKPTVDIELVTTTVSNMAEVRSYCYEASISDMTSDSRCPTQGEAYLDKQSDTQYVCKRTLVDRGWGNGCGLFGKGSLVTCAKFTCSKKMTGKSIQPENLEYRIMLSVHGSQHSGMIGYETDENRAEVEVTPNSPRAEATLGGFGSLGLDCEPRTGLDFSDLYYLTMNNKHWLVHKEWFHDIPLPWHAGADTGTPHWNNKEALVEFKDAHAKRQTVVVLGSQEGAVHTALAGALEAEMDGAKGKLFSGHLKCRLKMDKLRLKG

SEQ ID NO: 1649 - protein, 93 aa, Zika virus; identical to SEQ ID NO: 1155

SEQ ID NO: 1650 - protein, 97 aa, Zika virus; identical to SEQ ID NO: 1156

SEQ ID NO: 1651 - protein, 500 aa, Zika virus
IRCIGVSNRDFVEGMSGGTWVDVVLEHGGCVTVMAQDKPTVDIELVTTTVSNMAEVRSYCYEASISDMASDSRCPTQGEAYLDKQSDTQYVCKRTLVDRGWGNGCGLFGKGSLVTCAKFTCSKKMTGKSIQPENLEYRIMLSVHGSQHSGMIGNETDENRAKVEVTPNSPRAEATLGGFGSLGLDCEPRTGLDFSDLYYLTMNNKHWLVHKEWFHDIPLPWHAGADTGTPHWNNKEALVEFKDAHAKRQTVVVLGSQEGAVHTALAGALEAEMDGAKGKLFSGHLKCRLKMDKLRLKGVSYSLCTAAFTFTKVPAETLHGTVTVEVQYAGTDGPCKIPVQMAVDMQTLTPVGRLITANPVITESTENSKMMLELDPPFGDSYIVIGVGDKKITHHWHRSGSTIGKAFEATVRGAKRMAVLGDTAWDFGSVGGVFNSLGKGIHQIFGAAFKSLFGGMSWFSQILIGTLLVWLGLNTKNGSISLTCLALGGVMIFLSTAVSA

SEQ ID NO: 1652 - protein, 297 aa, Zika virus
RCIGVSNRDFVEGMSGGTWVDVVLEHGGCVTVMAQDKPTVDIELVTTTVSNMAEVRSYCYEASISDMASDSRCPTQGEAYLDKQSDTQYVCKRTLVDRGWGNGCGLFGKGSLVTCAKFTCSKKMTGKSIQPENLEYRIMLSVHGSQHSGMIGNETDENRAKVEVTPNSPRAEATLGGFGSLGLDCEPRTGLDFSDLYYLTMNNKHWLVHKEWFHDIPLPWHAGADTGTPHWNNKEALVEFKDAHAKRQTVVVLGSQEGAVHTALAGALEAEMDGAKGKLFSGHLKCRLKMDKLRLKG

SEQ ID NO: 1653 - protein, 93 aa, Zika virus; identical to SEQ ID NO: 1155

SEQ ID NO: 1654 - protein, 97 aa, Zika virus; identical to SEQ ID NO: 1156

SEQ ID NO: 1655 - protein, 500 aa, Zika virus; identical to SEQ ID NO: 1488

SEQ ID NO: 1656 - protein, 297 aa, Zika virus; identical to SEQ ID NO: 1489

SEQ ID NO: 1657 - protein, 93 aa, Zika virus; identical to SEQ ID NO: 1155

SEQ ID NO: 1658 - protein, 97 aa, Zika virus; identical to SEQ ID NO: 1156

SEQ ID NO: 1659 - protein, 500 aa, Zika virus; identical to SEQ ID NO: 1551

SEQ ID NO: 1660 - protein, 297 aa, Zika virus; identical to SEQ ID NO: 1392

SEQ ID NO: 1661 - protein, 93 aa, Zika virus; identical to SEQ ID NO: 1155

SEQ ID NO: 1662 - protein, 97 aa, Zika virus; identical to SEQ ID NO: 1156

SEQ ID NO: 1663 - protein, 500 aa, Zika virus; identical to SEQ ID NO: 1551

SEQ ID NO: 1664 - protein, 297 aa, Zika virus; identical to SEQ ID NO: 1392

SEQ ID NO: 1665 - protein, 93 aa, Zika virus; identical to SEQ ID NO: 1155

SEQ ID NO: 1666 - protein, 97 aa, Zika virus; identical to SEQ ID NO: 1156

SEQ ID NO: 1667 - protein, 500 aa, Zika virus; identical to SEQ ID NO: 1603

SEQ ID NO: 1668 - protein, 297 aa, Zika virus; identical to SEQ ID NO: 1604

SEQ ID NO: 1669 - protein, 93 aa, Zika virus; identical to SEQ ID NO: 1482

SEQ ID NO: 1670 - protein, 97 aa, Zika virus; identical to SEQ ID NO: 1156

SEQ ID NO: 1671 - protein, 500 aa, Zika virus
IRCIGVSNRDFVEGMSGGTWVDVVLEHGGCVTVMAQDKPTVDIELVTTTVSNMAEVRSYCYEASISDMVSDSRCPTQGEAYLDKQSDTQYVCKRTLVDRGWGNGCGLFGKGSLVTCAKFTCSKKMTGKSIQPENLEYRIMLSVHGSQHSGMIGYETDENRAKVEVTPNSPRAEATLGGFGSLGLDCEPRTGLDFSDLYYLTMNNKHWLVHKEWFHDIPLPWHAGADTGTPHWNNKEALVEFKDAHAKRQTVVVLGSQEGAVHTALAGALEAEMDGAKGKLFSGHLKCRLKMDKLRLKGVSYSLCTAAFTFTKVPAETLHGTVTVEVQYAGTDGPCKIPVQMAVDMQTLTPVGRLITANPVITESTENSKMMLELDPPFGDSYIVIGVGDKKITHHWHRSGSTIGKAFEATVRGAKRMAVLGDTAWDFGSVGGVFNSLGKGIHQIFGAAFKSLFGGMSWFSQILIGTLLVWLGLNTKNGSISLTCLALGGVMIFLSTAVSA

SEQ ID NO: 1672 - protein, 297 aa, Zika virus
RCIGVSNRDFVEGMSGGTWVDVVLEHGGCVTVMAQDKPTVDIELVTTTVSNMAEVRSYCYEASISDMVSDSRCPTQGEAYLDKQSDTQYVCKRTLVDRGWGNGCGLFGKGSLVTCAKFTCSKKMTGKSIQPENLEYRIMLSVHGSQHSGMIGYETDENRAKVEVTPNSPRAEATLGGFGSLGLDCEPRTGLDFSDLYYLTMNNKHWLVHKEWFHDIPLPWHAGADTGTPHWNNKEALVEFKDAHAKRQTVVVLGSQEGAVHTALAGALEAEMDGAKGKLFSGHLKCRLKMDKLRLKG

SEQ ID NO: 1673 - protein, 93 aa, Zika virus; identical to SEQ ID NO: 1155

SEQ ID NO: 1674 - protein, 97 aa, Zika virus; identical to SEQ ID NO: 1156

SEQ ID NO: 1675 - protein, 500 aa, Zika virus
IRCIGVSNRDFVEGMSGGTWVDVVLEHGGCVTVMAQDKPTVDIELVTTTVSNMAEVRSYCYEASISDMASDSRCPTQGEAYLDKQSDTQYVCKRTLVDRGWGNGCGLFGKGSLVTCARFTCSKKMTGKSIQPENLEYRIMLSVHGSQHSGMIGYETDENRAKVEVTPNSPRAEATLGGFGSLGLDCEPRTGLDFSDLYYLTMNNKHWLVHKEWFHDIPLPWHAGADTGTPHWNNKEALVEFKDAHAKRQTVVVLGSQEGAVHTALAGALEAEMDGAKGKLFSGHLKCRLKMDKLRLKGVSYSLCTAAFTFTKVPAETLHGTVTVEVQYAGTDGPCKIPVQMAVDMQTLTPVGRLITANPVITESTENSKMMLELDPPFGDSYIVIGVGDKKITHHWHRSGSTIGKAFEATVRGAKRMAVLGDTAWDFGSVGGVFNSLGKGIHQIFGAAFKSLFGGMSWFSQILIGTLLVWLGLNTKNGSISLTCLALGGVMIFLSTAVSA

SEQ ID NO: 1676 - protein, 297 aa, Zika virus
RCIGVSNRDFVEGMSGGTWVDVVLEHGGCVTVMAQDKPTVDIELVTTTVSNMAEVRSYCYEASISDMASDSRCPTQGEAYLDKQSDTQYVCKRTLVDRGWGNGCGLFGKGSLVTCARFTCSKKMTGKSIQPENLEYRIMLSVHGSQHSGMIGYETDENRAKVEVTPNSPRAEATLGGFGSLGLDCEPRTGLDFSDLYYLTMNNKHWLVHKEWFHDIPLPWHAGADTGTPHWNNKEALVEFKDAHAKRQTVVVLGSQEGAVHTALAGALEAEMDGAKGKLFSGHLKCRLKMDKLRLKG

SEQ ID NO: 1677 - protein, 93 aa, Zika virus; identical to SEQ ID NO: 1155

SEQ ID NO: 1678 - protein, 97 aa, Zika virus; identical to SEQ ID NO: 1156

SEQ ID NO: 1679 - protein, 500 aa, Zika virus; identical to SEQ ID NO: 1651

SEQ ID NO: 1680 - protein, 297 aa, Zika virus; identical to SEQ ID NO: 1652

SEQ ID NO: 1681 - protein, 93 aa, Zika virus; identical to SEQ ID NO: 1155

SEQ ID NO: 1682 - protein, 97 aa, Zika virus; identical to SEQ ID NO: 1156

SEQ ID NO: 1683 - protein, 500 aa, Zika virus
IRCIGVSNRDFVEGMSGGTWVDVVLEHGGCVTVMAQDKPTVDIELVTTTVSNMAEVRSYCYEASISDMASDSRCPTQGEAYLDEQSDTQYVCKRTLVDRGWGNGCGLFGKGSLVTCAKFTCSKKMTGKSIQPENLEYRIMLSVHGSQHSGMIGNETDENRAKVEVTPNSPRAEATLGGFGSLGLDCEPRTGLDFSDLYYLTMNNKHWLVHKEWFHDIPLPWHAGADTGTPHWNNKEALVEFKDAHAKRQTVVVLGSQEGAVHTALAGALEAEMDGAKGKLFSGHLKCRLKMDKLRLKGVSYSLCTAAFTFTKVPAETLHGTVTVEVQYAGTDGPCKIPVQMAVDMQTLTPVGRLITANPVITESTENSKMMLELDPPFGDSYIVIGVGDKKITHHWHRSGSTIGKAFEATVRGAKRMAVLGDTAWDFGSVGGVFNSLGKGIHQIFGAAFKSLFGGMSWFSQILIGTLLVWLGLNTKNGSISLTCLALGGVMIFLSTAVSA

SEQ ID NO: 1684 - protein, 297 aa, Zika virus
RCIGVSNRDFVEGMSGGTWVDVVLEHGGCVTVMAQDKPTVDIELVTTTVSNMAEVRSYCYEASISDMASDSRCPTQGEAYLDEQSDTQYVCKRTLVDRGWGNGCGLFGKGSLVTCAKFTCSKKMTGKSIQPENLEYRIMLSVHGSQHSGMIGNETDENRAKVEVTPNSPRAEATLGGFGSLGLDCEPRTGLDFSDLYYLTMNNKHWLVHKEWFHDIPLPWHAGADTGTPHWNNKEALVEFKDAHAKRQTVVVLGSQEGAVHTALAGALEAEMDGAKGKLFSGHLKCRLKMDKLRLKG

SEQ ID NO: 1685 - protein, 93 aa, Zika virus; identical to SEQ ID NO: 1155

SEQ ID NO: 1686 - protein, 97 aa, Zika virus; identical to SEQ ID NO: 1156

SEQ ID NO: 1687 - protein, 500 aa, Zika virus
IRCIGVSNRDFVEGMSGGTWVDVVLEHGGCVTVMAQDKPTVDIELVTTTVSNMAEVRSYCYEASISDMASDSRCPTQGEAYLDKQSDTQYVCKRTLVDRGWGNGCGLFGKGSLVTCAKFTCSKKMTGKSIQPENLEYRIMLSVHGSQHSGMIGYETDKNRAKVEVTPNSPRAEATLGGFGSLGLDCEPRTGLDFSDLYYLTMNNKHWLVHKEWFHDIPLPWHAGADTGTPHWNNKEALVEFKDAHAKRQTVVVLGSQEGAVHTALAGALEAEMDGAKGKLFSGHLKCRLKMDKLRLKGVSYSLCTAAFTFTKVPAETLHGTVTVEVQYAGTDGPCKIPVQMAVDMQTLTPVGRLITANPVITESTENSKMMLELDPPFGDSYIVIGVGDKKITHHWYRSGSTIGKAFEATVRGAKRMAVLGDTAWDFGSVGGVFNSLGKGIHQIFGAAFKSLFGGMSWFSQILIGTLLVWLGLNTKNGSISLTCLALGGVMIFLSTAVSA

SEQ ID NO: 1688 - protein, 297 aa, Zika virus; identical to SEQ ID NO: 1644

SEQ ID NO: 1689 - protein, 93 aa, Zika virus; identical to SEQ ID NO: 1482

SEQ ID NO: 1690 - protein, 97 aa, Zika virus; identical to SEQ ID NO: 1156

SEQ ID NO: 1691 - protein, 500 aa, Zika virus; identical to SEQ ID NO: 1567

SEQ ID NO: 1692 - protein, 297 aa, Zika virus; identical to SEQ ID NO: 1548

SEQ ID NO: 1693 - protein, 93 aa, Zika virus; identical to SEQ ID NO: 1482

SEQ ID NO: 1694 - protein, 97 aa, Zika virus; identical to SEQ ID NO: 1570

SEQ ID NO: 1695 - protein, 500 aa, Zika virus
IRCIGVSNRDFVEGMSGGTWVDVVLEHGGCVTVMAQDKPTVDIELVTTTVSNMAEVRSYCYEASISDMASDSRCPTQGEAYLDKQSDTQYVCKRTLVDRGWGNGCGLFGKGSLVTCAKFTCSKKMTGKSIQPENLEYRIMLSVHGSQHSGMIGYETDENRAKVEVTPNSPRAEATLGGFGSLGLDCEPRTGLDFSDLYYLTMNNKHWLVHKEWFHDIPLPWHAGADTGTPHWNNKEALVEFKDAHAKRQTVVVLGSQEGAVHTALAGALEAEMDGAKGKLFSGHLKCRLKMDKLRLKGVSYSLCTAAFTFTKVPAETLHGTVTVEVQYAGTDGPCKIPVQMAVDMQTLTPVGRLITANPVITESTENSKMMLELDPPFGDSYIVIGVGDKKITHHWYRSGSTIGKAFEATVRGAKRMAVLGDTAWDFGSVGGVFNSLGKGIHQIFGAAFKSLFGGMSWFSQILIGTLLVWLGLNTKNGSISLTCLALGGVMIFLSTAVSA

SEQ ID NO: 1696 - protein, 297 aa, Zika virus; identical to SEQ ID NO: 1392

SEQ ID NO: 1697 - protein, 93 aa, Zika virus; identical to SEQ ID NO: 1482

SEQ ID NO: 1698 - protein, 97 aa, Zika virus; identical to SEQ ID NO: 1156

SEQ ID NO: 1699 - protein, 500 aa, Zika virus; identical to SEQ ID NO: 1651

SEQ ID NO: 1700 - protein, 297 aa, Zika virus; identical to SEQ ID NO: 1652

SEQ ID NO: 1701 - protein, 93 aa, Zika virus; identical to SEQ ID NO: 1155

SEQ ID NO: 1702 - protein, 97 aa, Zika virus; identical to SEQ ID NO: 1156

SEQ ID NO: 1703 - protein, 500 aa, Zika virus
IRCIGVSNRDFVEGMSGGTWVDVVLEHGGCVTVMAQDKPTVDIELVTTTVSNMAEVRSYCYEASILDMASDSRCPTQGEAYLDKQSDTQYVCKRTLVDRGWGNGCGLFGKGSLVTCAKFTCSKKMTGKSIQPENLEYRIMLSVHGSQHSGMIGNETDENRAKVEVTPNSPRAEATLGGFGSLGLDCEPRTGLDFSDLYYLTMNNKHWLVHKEWFHDIPLPWHAGADTGTPHWNNKEALVEFKDAHAKRQTVVVLGSQEGAVHTALAGALEAEMDGAKGKLFSGHLKCRLKMDKLRLKGVSYSLCTAAFTFTKVPAETLHGTVTVEVQYAGTDGPCKIPVQMAVDMQTLTPVGRLITANPVITESTENSKMMLELDPPFGDSYIVIGVGDKKITHHWHRSGSTIGKAFEATVRGAKRMAVLGDTAWDFGSVGGVFNSLGKGIHQIFGAAFKSLFGGMSWFSQILIGTLLVWLGLNTKNGSISLTCLALGGVMIFLSTAVSA

SEQ ID NO: 1704 - protein, 297 aa, Zika virus
RCIGVSNRDFVEGMSGGTWVDVVLEHGGCVTVMAQDKPTVDIELVTTTVSNMAEVRSYCYEASILDMASDSRCPTQGEAYLDKQSDTQYVCKRTLVDRGWGNGCGLFGKGSLVTCAKFTCSKKMTGKSIQPENLEYRIMLSVHGSQHSGMIGNETDENRAKVEVTPNSPRAEATLGGFGSLGLDCEPRTGLDFSDLYYLTMNNKHWLVHKEWFHDIPLPWHAGADTGTPHWNNKEALVEFKDAHAKRQTVVVLGSQEGAVHTALAGALEAEMDGAKGKLFSGHLKCRLKMDKLRLKG

SEQ ID NO: 1705 - protein, 93 aa, Zika virus; identical to SEQ ID NO: 1155

SEQ ID NO: 1706 - protein, 97 aa, Zika virus; identical to SEQ ID NO: 1156

SEQ ID NO: 1707 - protein, 500 aa, Zika virus
IRCIGVSNRDFVEGMSGGTWVDVVLEHGGCVTVMAQDKPTVDIELVTTTVSNMAEVRSYCYEASISDMASDSRCPTQGEAYLDKQSDTQYVCKRTLVDRGWGNGCGLFGKGSLVTCAKFTCSKKMTGKSIQPENLEYRIMLSVHGSQHSGMIGYETDANRAKVEVTPNSPRAEATLGDFGSLGLDCEPRTGLDFSDLYYLTMNNKHWLVHKEWFHDIPLPWHAGADTGTPHWNNKEALVEFKDAHAKRQTVVVLGSQEGAVHTALAGALEAEMDGAKGKLFSGHLKCRLKMDKLRLKGVSYSLCTAAFTFTKVPAETLHGTVTVEVQYAGTDGPCKIPVQMAVDMQTLTPVGRLITANPVITESTENSKMMLELDPPFGDSYIVIGVGDKKITHHWHRSGSTIGKAFEATVRGAKRMAVLGDTAWDFGSVGGVFNSLGKGIHQIFGAAFKSLFGGMSWFSQILIGTLLVWLGLNTKNGSISLTCLALGGVMIFLSTAVSA

SEQ ID NO: 1708 - protein, 297 aa, Zika virus
RCIGVSNRDFVEGMSGGTWVDVVLEHGGCVTVMAQDKPTVDIELVTTTVSNMAEVRSYCYEASISDMASDSRCPTQGEAYLDKQSDTQYVCKRTLVDRGWGNGCGLFGKGSLVTCAKFTCSKKMTGKSIQPENLEYRIMLSVHGSQHSGMIGYETDANRAKVEVTPNSPRAEATLGDFGSLGLDCEPRTGLDFSDLYYLTMNNKHWLVHKEWFHDIPLPWHAGADTGTPHWNNKEALVEFKDAHAKRQTVVVLGSQEGAVHTALAGALEAEMDGAKGKLFSGHLKCRLKMDKLRLKG

SEQ ID NO: 1709 - protein, 93 aa, Zika virus; identical to SEQ ID NO: 1155

SEQ ID NO: 1710 - protein, 97 aa, Zika virus; identical to SEQ ID NO: 1156

SEQ ID NO: 1711 - protein, 500 aa, Zika virus; identical to SEQ ID NO: 1551

SEQ ID NO: 1712 - protein, 297 aa, Zika virus; identical to SEQ ID NO: 1392

SEQ ID NO: 1713 - protein, 93 aa, Zika virus; identical to SEQ ID NO: 1155

SEQ ID NO: 1714 - protein, 97 aa, Zika virus; identical to SEQ ID NO: 1156

SEQ ID NO: 1715 - protein, 500 aa, Zika virus
IRCIGVSNRDFVEGMSGGTWVDVVLEHGGCVTVMAQDKPTVDIELVTTTVSNMAEVRSYCYEASISDMVSDSRCPTQGEAYLDKQSDTQYVCKRTLVDRGWGNGCGLFGKGSLVTCAKFTCSKKMTGKSIQPENLEYRIMLSVHGSQHSGMIGYETDENRAKVEVTPNSPRAEATLGGFGSLGLDCEPRTGLDFSDLYYLTMNNKHWLVHKEWFHDIPLPWHAGADTGTPHWNNKEALVEFKDAHAKRQTVVVLGSQEGAVHTALAGALEAEMDGAEGKLFSGHLKCRLKMDKLRLKGVSYSLCTAAFTFTKVPAETLHGTVTVEVQYAGTDGPCKIPVQMAVDMQTLTPVGRLITANPVITESTENSKMMLELDPPFGDSYIVIGVGDKKITHHWHRSGSTIGKAFEATVRGAKRMAVLGDTAWDFGSVGGVFNSLGKGIHQIFGAAFKSLFGGMSWFSQILIGTLLVWLGLNTKNGSISLTCLALGGVMIFLSTAVSA

SEQ ID NO: 1716 - protein, 297 aa, Zika virus
RCIGVSNRDFVEGMSGGTWVDVVLEHGGCVTVMAQDKPTVDIELVTTTVSNMAEVRSYCYEASISDMVSDSRCPTQGEAYLDKQSDTQYVCKRTLVDRGWGNGCGLFGKGSLVTCAKFTCSKKMTGKSIQPENLEYRIMLSVHGSQHSGMIGYETDENRAKVEVTPNSPRAEATLGGFGSLGLDCEPRTGLDFSDLYYLTMNNKHWLVHKEWFHDIPLPWHAGADTGTPHWNNKEALVEFKDAHAKRQTVVVLGSQEGAVHTALAGALEAEMDGAEGKLFSGHLKCRLKMDKLRLKG

SEQ ID NO: 1717 - protein, 93 aa, Zika virus; identical to SEQ ID NO: 1155

SEQ ID NO: 1718 - protein, 97 aa, Zika virus; identical to SEQ ID NO: 1156

SEQ ID NO: 1719 - protein, 500 aa, Zika virus
IRCIGVSNRDFVEGMSGGTWVDVVLEHGGCVTVMAQDKPTVDIELVTTTVSNMAEVRSYCYEASISDMASDSRCPTQGEAYLDKQSDTQYVCKRTLVDRGWGNGCGLFGKGSLVTCAKFTCSKKMTGKSIQPENLEYRIMLSVHGSQHSGMIGYETDKNRAKVEVTPNSPRAEATLGGFGSLGLDCEPRTGLDFSDLYYLTMNNKHWLVHKEWFHDIPLPWHAGADTGTPHWNNKEALVEFKDAHAKRQTVVVLGSQEGAVHTALAGALEAEMDGAKGKLFSGHLKCRLKMDKLRLKGVSYSLCTAAFTFTKVPAETLHGTVTVEVQYAGTDGPCKIPVQMAVDMQTLTPVGRLITANPVITESTENSKMMLELDPPFGDSYIVIGVGDKKITHHWHRSGSTIGKAFEATVRGAKRMAVLGDTAWDFGSVGGVFNSLGKGIHQIFGAAFKSLFGGMSWFSQILIGTLLVWLGLNTKNGSISLTCLALGGMMIFLSTAVSA

SEQ ID NO: 1720 - protein, 297 aa, Zika virus; identical to SEQ ID NO: 1644

SEQ ID NO: 1721 - protein, 93 aa, Zika virus; identical to SEQ ID NO: 1155

SEQ ID NO: 1722 - protein, 97 aa, Zika virus
GKAFEATVRGAKRMAVLGDTAWDFGSVGGVFNSLGKGIHQIFGAAFKSLFGGMSWFSQILIGTLLVWLGLNTKNGSISLTCLALGGMMIFLSTAVSA

SEQ ID NO: 1723 - protein, 500 aa, Zika virus; identical to SEQ ID NO: 1651

SEQ ID NO: 1724 - protein, 297 aa, Zika virus; identical to SEQ ID NO: 1652

SEQ ID NO: 1725 - protein, 93 aa, Zika virus; identical to SEQ ID NO: 1155

SEQ ID NO: 1726 - protein, 97 aa, Zika virus; identical to SEQ ID NO: 1156

SEQ ID NO: 1727 - protein, 500 aa, Zika virus
IRCIGVSNRDFVEGMSGGTWVDVVLEHGGCVTVMAQDKPTVDIELVTTTVSNMAEVRSYCYEASISDMASDSRCPTQGEAYLDKQSDTQYVCKRTLVDRGWGNGCGLFGKGSLVTCAKFTCSKKMTGKSIQPENLEYRIMLSVHGSQHSGMIGYETDENRVKVEVTPNSPRAEATLGGFGSLGLDCEPRTGLDFSDLYYLTMNNKHWLVHKEWFHDIPLPWHAGADTGTPHWNNKEALVEFKDAHAKRQTVVVLGSQEGAVHTALAGALEAEMDGAKGKLFSGHLKCRLKMDKLRLKGVSYSLCTAAFTFTKVPAETLHGTVTVEVQYAGTDGPCKIPVQMAVDMQTLTPVGRLITANPVITESTENSKMMLELDPPFGDSYIVIGVGDKKITHHWYRSGSTIGKAFEATVRGAKRMAVLGDTAWDFGSVGGVFNSLGKGIHQIFGAAFKSLFGGMSWFSQILIGTLLVWLGLNTKNGSISLTCLALGGVMIFLSTAVSA

SEQ ID NO: 1728 - protein, 297 aa, Zika virus; identical to SEQ ID NO: 1564

SEQ ID NO: 1729 - protein, 93 aa, Zika virus; identical to SEQ ID NO: 1482

SEQ ID NO: 1730 - protein, 97 aa, Zika virus; identical to SEQ ID NO: 1156

SEQ ID NO: 1731 - protein, 500 aa, Zika virus
IRCIGVSNRDFVEGMSGGTWVDVVLEHGGCVTVMAQDKPTVDIELVTTTVSNMAEVRSYCYEASISDMTSDSRCPTQGEAYLDKQSDTQYVCKRTLVDRGWGNGCGLFGKGSLVTCAKFTCSKKMTGKSIQPENLEYRMMLSVHGSQHSGMIGYETDENRAEVEVTPNSPRAEATLGGFGSLGLDCEPRTGLDFSDLYYLTMNNKHWLVHKEWFHDIPLPWHAGADTGTPHWNNKEALVEFKDAHAKRQTVVVLGSQEGAVHTALAGALEAEMDGAKGKLFSGHLKCRLKMDKLRLKGVSYSLCTAAFTFTKVPAETLHGTVTVEVQYAGTDGPCKIPVQMAVDMQTLTPVGRLITANPVITESTENSKMMLELDPPFGDSYIVIGVGDKKITHHWHRSGSTIGKAFEATVRGAKRMAVLGDTAWDFGSVGGVFNSLGKGIHQIFGAAFKSLFGGMSWFSQILIGTLLVWLGLNTKNGSISLTCLALGGVMIFLSTAVSA

SEQ ID NO: 1732 - protein, 297 aa, Zika virus
RCIGVSNRDFVEGMSGGTWVDVVLEHGGCVTVMAQDKPTVDIELVTTTVSNMAEVRSYCYEASISDMTSDSRCPTQGEAYLDKQSDTQYVCKRTLVDRGWGNGCGLFGKGSLVTCAKFTCSKKMTGKSIQPENLEYRMMLSVHGSQHSGMIGYETDENRAEVEVTPNSPRAEATLGGFGSLGLDCEPRTGLDFSDLYYLTMNNKHWLVHKEWFHDIPLPWHAGADTGTPHWNNKEALVEFKDAHAKRQTVVVLGSQEGAVHTALAGALEAEMDGAKGKLFSGHLKCRLKMDKLRLKG

SEQ ID NO: 1733 - protein, 93 aa, Zika virus; identical to SEQ ID NO: 1155

SEQ ID NO: 1734 - protein, 97 aa, Zika virus; identical to SEQ ID NO: 1156

SEQ ID NO: 1735 - protein, 500 aa, Zika virus; identical to SEQ ID NO: 1615

SEQ ID NO: 1736 - protein, 297 aa, Zika virus; identical to SEQ ID NO: 1612

SEQ ID NO: 1737 - protein, 93 aa, Zika virus; identical to SEQ ID NO: 1482

SEQ ID NO: 1738 - protein, 97 aa, Zika virus; identical to SEQ ID NO: 1156

SEQ ID NO: 1739 - protein, 500 aa, Zika virus; identical to SEQ ID NO: 1695

SEQ ID NO: 1740 - protein, 297 aa, Zika virus; identical to SEQ ID NO: 1392

SEQ ID NO: 1741 - protein, 93 aa, Zika virus; identical to SEQ ID NO: 1482

SEQ ID NO: 1742 - protein, 97 aa, Zika virus; identical to SEQ ID NO: 1156

SEQ ID NO: 1743 - protein, 500 aa, Zika virus; identical to SEQ ID NO: 1675

SEQ ID NO: 1744 - protein, 297 aa, Zika virus; identical to SEQ ID NO: 1676

SEQ ID NO: 1745 - protein, 93 aa, Zika virus; identical to SEQ ID NO: 1155

SEQ ID NO: 1746 - protein, 97 aa, Zika virus; identical to SEQ ID NO: 1156

SEQ ID NO: 1747 - protein, 500 aa, Zika virus; identical to SEQ ID NO: 1651

SEQ ID NO: 1748 - protein, 297 aa, Zika virus; identical to SEQ ID NO: 1652

SEQ ID NO: 1749 - protein, 93 aa, Zika virus; identical to SEQ ID NO: 1155

SEQ ID NO: 1750 - protein, 97 aa, Zika virus; identical to SEQ ID NO: 1156

SEQ ID NO: 1751 - protein, 500 aa, Zika virus; identical to SEQ ID NO: 1615

SEQ ID NO: 1752 - protein, 297 aa, Zika virus; identical to SEQ ID NO: 1612

SEQ ID NO: 1753 - protein, 93 aa, Zika virus; identical to SEQ ID NO: 1482

SEQ ID NO: 1754 - protein, 97 aa, Zika virus; identical to SEQ ID NO: 1156

SEQ ID NO: 1755 - protein, 500 aa, Zika virus; identical to SEQ ID NO: 1727

SEQ ID NO: 1756 - protein, 297 aa, Zika virus; identical to SEQ ID NO: 1564

SEQ ID NO: 1757 - protein, 93 aa, Zika virus; identical to SEQ ID NO: 1482

SEQ ID NO: 1758 - protein, 97 aa, Zika virus; identical to SEQ ID NO: 1156

SEQ ID NO: 1759 - protein, 500 aa, Zika virus; identical to SEQ ID NO: 1599

SEQ ID NO: 1760 - protein, 297 aa, Zika virus; identical to SEQ ID NO: 1600

SEQ ID NO: 1761 - protein, 93 aa, Zika virus; identical to SEQ ID NO: 1482

SEQ ID NO: 1762 - protein, 97 aa, Zika virus; identical to SEQ ID NO: 1156

SEQ ID NO: 1763 - protein, 500 aa, Zika virus; identical to SEQ ID NO: 1647

SEQ ID NO: 1764 - protein, 297 aa, Zika virus; identical to SEQ ID NO: 1648

SEQ ID NO: 1765 - protein, 93 aa, Zika virus; identical to SEQ ID NO: 1155

SEQ ID NO: 1766 - protein, 97 aa, Zika virus; identical to SEQ ID NO: 1156

SEQ ID NO: 1767 - protein, 500 aa, Zika virus; identical to SEQ ID NO: 1583

SEQ ID NO: 1768 - protein, 297 aa, Zika virus; identical to SEQ ID NO: 1584

SEQ ID NO: 1769 - protein, 93 aa, Zika virus; identical to SEQ ID NO: 1155

SEQ ID NO: 1770 - protein, 97 aa, Zika virus; identical to SEQ ID NO: 1586

SEQ ID NO: 1771 - protein, 500 aa, Zika virus
IRCIGVSNRDFVEGMSGGTWVDVVLEHGGCVTVMAQDKPTVDIELVTTTVSNMAEVRSYCYEASISDMASDSRCPTQGEAYLDKQSDTQYVCKRTLVDRGWGNGCGLFGKGSLVTCAKFTCSKKMTGKSIQPENLEYRIMLSVHGSQHSGMIGYETDENRAKVEVTPNSPRAEATLEGFGSLGLDCEPRTGLDFSDLYYLTMNNKHWLVHKEWFHDIPLPWHAGADTGTPHWNNKEALVEFKDAHAKRQTVVVLGSQEGAVHTALAGALEAEMDGAKGKLFSGHLKCRLKMDKLRLKGVSYSLCTAAFTFTKVPAETLHGTVTVEVQYAGTDGPCKIPVQMAVDMQTLTPVGRLITANPVITESTENSKMMLELDPPFGDSYIVIGVGDKKITHHWHRSGSTIGKAFEATVRGAKRMAVLGDTAWDFGSVGGVFNSLGKGIHQIFGAAFKLLFGGMSWFSQILIGTLLVWLGLNTKNGSISLTCLALGGVMIFLSTAVSA

SEQ ID NO: 1772 - protein, 297 aa, Zika virus
RCIGVSNRDFVEGMSGGTWVDVVLEHGGCVTVMAQDKPTVDIELVTTTVSNMAEVRSYCYEASISDMASDSRCPTQGEAYLDKQSDTQYVCKRTLVDRGWGNGCGLFGKGSLVTCAKFTCSKKMTGKSIQPENLEYRIMLSVHGSQHSGMIGYETDENRAKVEVTPNSPRAEATLEGFGSLGLDCEPRTGLDFSDLYYLTMNNKHWLVHKEWFHDIPLPWHAGADTGTPHWNNKEALVEFKDAHAKRQTVVVLGSQEGAVHTALAGALEAEMDGAKGKLFSGHLKCRLKMDKLRLKG

SEQ ID NO: 1773 - protein, 93 aa, Zika virus; identical to SEQ ID NO: 1155

SEQ ID NO: 1774 - protein, 97 aa, Zika virus; identical to SEQ ID NO: 1586

SEQ ID NO: 1775 - protein, 500 aa, Zika virus; identical to SEQ ID NO: 1619

SEQ ID NO: 1776 - protein, 297 aa, Zika virus; identical to SEQ ID NO: 1620

SEQ ID NO: 1777 - protein, 93 aa, Zika virus; identical to SEQ ID NO: 1482

SEQ ID NO: 1778 - protein, 97 aa, Zika virus; identical to SEQ ID NO: 1156

SEQ ID NO: 1779 - protein, 500 aa, Zika virus
IRCIGVSNRDFVEGMSGGTWVDVVLEHGGCVTVMAQDKPTVDIELVTTTVSNMAEVRSYCYEASISDMASDSRCPTQGEAYLDKQSDTQYVCKRTLVDRGWGNGCGLFGKGSLVTCAKFTCSKKMTGKSIQPENLEYRIMLSVHGSQHSGMIGNETDENRAKVEVTPNSPRAEATLGGFGSLGLDCEPRTGLDFSDLYYLTMNNKHWLVHKEWFHDIPLPWHAGADTGTPHWNNKEALVEFKDAHAMRQTVVVLGSQEGAVHTALAGALEAEMDGAKGKLFSGHLKCRLKMDKLRLKGVSYSLCTAAFTFTKVPAETLHGTVTVEVQYAGTDGPCKIPVQMAVDMQTLTPVGRLITANPVITESTENSKMMLELDPPFGDSYIVIGVGDKKITHHWHRSGSTIGKAFEATVRGAKRMAVLGDTAWDFGSVGGVFNSLGKGIHQIFGAAFKSLFGGMSWFSQILIGTLLVWLGLNTKNGSISLTCLALGGVMIFLSTAVSA

SEQ ID NO: 1780 - protein, 297 aa, Zika virus
RCIGVSNRDFVEGMSGGTWVDVVLEHGGCVTVMAQDKPTVDIELVTTTVSNMAEVRSYCYEASISDMASDSRCPTQGEAYLDKQSDTQYVCKRTLVDRGWGNGCGLFGKGSLVTCAKFTCSKKMTGKSIQPENLEYRIMLSVHGSQHSGMIGNETDENRAKVEVTPNSPRAEATLGGFGSLGLDCEPRTGLDFSDLYYLTMNNKHWLVHKEWFHDIPLPWHAGADTGTPHWNNKEALVEFKDAHAMRQTVVVLGSQEGAVHTALAGALEAEMDGAKGKLFSGHLKCRLKMDKLRLKG

SEQ ID NO: 1781 - protein, 93 aa, Zika virus; identical to SEQ ID NO: 1155

SEQ ID NO: 1782 - protein, 97 aa, Zika virus; identical to SEQ ID NO: 1156

SEQ ID NO: 1783 - protein, 500 aa, Zika virus
IRCIGVSNRDFVEGMSGGTWVDVVLEHGGCVTVMAQDKPTVDIELVTTTVSNMAEVRSYCYEASISDMASDSRCPTQGEAYLDKQSDTQYVCKRTLVDRGWGNGCGLFGKGSLVTCAKFTCSKKMTGKSIQPENLEYRIMLSVHGSQHSGMIGYETDGNRAKVEVTPNSPRAEATLGGFGSLGLDCEPRTGLDFSDLYYLTMNNKHWLVHKEWFHDIPLPWHAGADTGTPHWNNKEALVEFKDAHAKRQTVVVLGSQEGAVHTALAGALEAEMDGAKGKLFSGHLKCRLKMDKLRLKGVSYSLCTAAFTFTKVPAETLHGTVTVEVQYAGTDGPCKIPVQMAVDMQTLTPVGRLITANPVITESTENSKMMLELDPPFGDSYIVIGVGDKKITHHWHRSGSTIGKAFEATVRGAKRMAVLGDTAWDFGSVGGVFNSLGKGIHQIFGAAFKLLFGGMSWFSQILIGTLLVWLGLNTKNGSISLTCLALGGVMIFLSTAVSA

SEQ ID NO: 1784 - protein, 297 aa, Zika virus; identical to SEQ ID NO: 1489

SEQ ID NO: 1785 - protein, 93 aa, Zika virus; identical to SEQ ID NO: 1155

SEQ ID NO: 1786 - protein, 97 aa, Zika virus; identical to SEQ ID NO: 1586

SEQ ID NO: 1787 - protein, 500 aa, Zika virus
IRCIGVSNRDFVEGMSGGTWVDVVLEHGGCVTVMAQDKPTVDIELVTTTVSNMAEVRSYCYEASISDMASDSRCPTQGEAYLDKQSDTQYVCKRTLVDRGWGNGCGLFGKGSLVTCARFTCSKKMTGKSIQPENLEYRIMLSVHGSQHSGMIGYETDENRAKVEVTPNSPRAEATLGGFGSLGLDCEPRTGLDFSDLYYLTMNNKHWLVHKEWFHDIPLPWHAGADTGTPHWNNKEALVEFKDAHAKRQTVVVLGSQEGAVHTALAGALEAEMDGAKGKLFSGHLKCRLKMDKLRLKGVSYSLCTAAFTFTKVPAETLHGTVTVEVQYAGNDGPCKIPVQMAVDMQTLTPVGRLITANPVITESTENSKMMLELDPPFGDSYIVIGVGDKKITHHWHRSGSTIGKAFEATVRGAKRMAVLGDTAWDFGSVGGVFNSLGKGIHQIFGAAFKSLFGGMSWFSQILIGTLLVWLGLNTKNGSISLTCLALGGVMIFLSTAVSA

SEQ ID NO: 1788 - protein, 297 aa, Zika virus; identical to SEQ ID NO: 1676

SEQ ID NO: 1789 - protein, 93 aa, Zika virus
AFTFTKVPAETLHGTVTVEVQYAGNDGPCKIPVQMAVDMQTLTPVGRLITANPVITESTENSKMMLELDPPFGDSYIVIGVGDKKITHHWHRS

SEQ ID NO: 1790 - protein, 97 aa, Zika virus; identical to SEQ ID NO: 1156

SEQ ID NO: 1791 - protein, 500 aa, Zika virus
IRCIGVSNRDFVEGMSGGTWVDVVLEHGGCVTVMAQDKPTVDIELVTTTVSNMAEVRSYCYEASISDMASDSRCPTQGEAYLDKQSDTQYVCKRTLVDRGWGNGCGLFGKGSLVTCAKFTCSKKMTGKSIQPENLEYRIMLSVHGSQHSGMIGHETDENRAKVEVTPNSPRAEATLGGFGSLGLDCEPRTGLDFSDLYYLTMNNKHWLVHKEWFHDIPLPWHAGADTGTPHWNNKEALVEFKDAHAERQTVVVLGSQEGAVHTALAGALEAEMDGAKGKLFSGHLKCRLKMDKLRLKGVSYSLCTAAFTFTKVPAETLHGTVTVEVQYAGTDGPCKIPVQMAVDMQTLTPVGRLITANPVITESTENSKMMLELDPPFGDSYIVIGVGDKKITHHWFRSGSTIGKAFEATVRGAKRMAVLGDTAWDFGSVGGVFNSLGKGIHQIFGAAFKSLFGGMSWFSQILIGTLLVWLGLNTKNGSISLTCLALGGVMIFLSTAVSA

SEQ ID NO: 1792 - protein, 297 aa, Zika virus
RCIGVSNRDFVEGMSGGTWVDVVLEHGGCVTVMAQDKPTVDIELVTTTVSNMAEVRSYCYEASISDMASDSRCPTQGEAYLDKQSDTQYVCKRTLVDRGWGNGCGLFGKGSLVTCAKFTCSKKMTGKSIQPENLEYRIMLSVHGSQHSGMIGHETDENRAKVEVTPNSPRAEATLGGFGSLGLDCEPRTGLDFSDLYYLTMNNKHWLVHKEWFHDIPLPWHAGADTGTPHWNNKEALVEFKDAHAERQTVVVLGSQEGAVHTALAGALEAEMDGAKGKLFSGHLKCRLKMDKLRLKG

SEQ ID NO: 1793 - protein, 93 aa, Zika virus
AFTFTKVPAETLHGTVTVEVQYAGTDGPCKIPVQMAVDMQTLTPVGRLITANPVITESTENSKMMLELDPPFGDSYIVIGVGDKKITHHWFRS

SEQ ID NO: 1794 - protein, 97 aa, Zika virus; identical to SEQ ID NO: 1156

SEQ ID NO: 1795 - protein, 500 aa, Zika virus; identical to SEQ ID NO: 1675

SEQ ID NO: 1796 - protein, 297 aa, Zika virus; identical to SEQ ID NO: 1676

SEQ ID NO: 1797 - protein, 93 aa, Zika virus; identical to SEQ ID NO: 1155

SEQ ID NO: 1798 - protein, 97 aa, Zika virus; identical to SEQ ID NO: 1156

SEQ ID NO: 1799 - protein, 500 aa, Zika virus; identical to SEQ ID NO: 1719

SEQ ID NO: 1800 - protein, 297 aa, Zika virus; identical to SEQ ID NO: 1644

SEQ ID NO: 1801 - protein, 93 aa, Zika virus; identical to SEQ ID NO: 1155

SEQ ID NO: 1802 - protein, 97 aa, Zika virus; identical to SEQ ID NO: 1722

SEQ ID NO: 1803 - protein, 301 aa, Zika virus; identical to SEQ ID NO: 1151

SEQ ID NO: 1804 - protein, 93 aa, Zika virus; identical to SEQ ID NO: 1148

SEQ ID NO: 1805 - protein, 97 aa, Zika virus; identical to SEQ ID NO: 1149

SEQ ID NO: 1806 - protein, 301 aa, Zika virus; identical to SEQ ID NO: 1151

SEQ ID NO: 1807 - protein, 93 aa, Zika virus; identical to SEQ ID NO: 1148

SEQ ID NO: 1808 - protein, 97 aa, Zika virus; identical to SEQ ID NO: 1149

SEQ ID NO: 1809 - protein, 301 aa, Zika virus; identical to SEQ ID NO: 1151

SEQ ID NO: 1810 - protein, 93 aa, Zika virus; identical to SEQ ID NO: 1148

SEQ ID NO: 1811 - protein, 97 aa, Zika virus
GKAFEATVRGARRMAVLGDTAWDFGSVGGALNSLGKGIHQIFGAAFKSLFGGMSWFSQILIGTLLMWLGLNTKNGSISLMCLALGGVLIFLSTAVSA

SEQ ID NO: 1812 - protein, 294 aa, Zika virus
RCIGVSNRDFVEGMSGGTWVDVVLEHGGCVTVMAQDKPTVDIELVTTTVSNMAEVRSYCYEASISDMASDSRCPTQGEAYLDKQSDTQYVCKRTLVDRGWGNGCGLFGKGSLVTCAKFACSKKMTGKSIQPENLEYRIMLSVHGSQHSGMIVNENRAKVEITPNSPRAEATLGGFGSLGLDCEPRTGLDFSDLYYLTMNNKHWLVHKEWFHDIPLPWHAGADTGTPHWNNKEALVEFKDAHAKRQTVVVLGSQEGAVHTALAGALEAEMDGAKGRLSSGHLKCRLKMDKLRLKG

SEQ ID NO: 1813 - protein, 93 aa, Zika virus; identical to SEQ ID NO: 1148

SEQ ID NO: 1814 - protein, 97 aa, Zika virus; identical to SEQ ID NO: 1811

SEQ ID NO: 1815 - protein, 93 aa, Zika virus; identical to SEQ ID NO: 1148

SEQ ID NO: 1816 - protein, 97 aa, Zika virus; identical to SEQ ID NO: 1149

SEQ ID NO: 1817 - protein, 93 aa, Zika virus; identical to SEQ ID NO: 1148

SEQ ID NO: 1818 - protein, 97 aa, Zika virus; identical to SEQ ID NO: 1149

SEQ ID NO: 1819 - protein, 297 aa, Zika virus
RCIGVSNRDFVEGMSGGTWVDVVLEHGGCVTVMAQDKPTVDIELVTTTVSNMAEVRSYCYEASISDMASDSRCPTQGEAYLDKQSDTQYVCKRTLVDRGWGNGCGLFGKGSLVTCAKFACSKKMTGKSIQPENLEYRIMLSVHGSQHSGMIGHETDENRAKVEITPNSPRAEATLGGFGSLGLDCEPRTGLDFSDLYYLTMNNKHWLVHKEWFHDIPLPWHAGADTGTPHWNNKEALVEFKDAHAKRQTVVVLGSQEGAVHTALAGALEAEMDGAKGRLSSGHLKCRLKMDKLRLKG

SEQ ID NO: 1820 - protein, 93 aa, Zika virus; identical to SEQ ID NO: 1148

SEQ ID NO: 1821 - protein, 97 aa, Zika virus; identical to SEQ ID NO: 1172

SEQ ID NO: 1822 - protein, 93 aa, Zika virus; identical to SEQ ID NO: 1148

SEQ ID NO: 1823 - protein, 97 aa, Zika virus; identical to SEQ ID NO: 1149

SEQ ID NO: 1824 - protein, 504 aa, Zika virus
IRCIGVSNRDFVEGMSGGTWVDIVLEHGGCVTVMAQDKPTVDIELVTTTVSNMAEVRSYCYEASISDMASDSRCPTQGEAYLDKQSDTQYVCKRTLVDRGWGNGCGLFGKGSLVTCAKFACSKKMTGKSIQPENLEYRIMLSVHGSQHSGMIVNDTGHETDENRAKVEITPNSPRAEATLGGFGSLGLDCEPRTGLDFSDLYYLTMNNKHWLVHKEWFHDIPLPWHAGADTGTPHWNNKEALVEFKDAHAKRQTVVVLGSQEGAVHTALAGALEAEMDGAKGRLSSGHLKCRLKMDKLRLKGVSYSLCTAAFTFTKIPAETLHGTVTVEVQYAGTDGPCKVPAQMAVDMQTLTPVGRLITANPVITESTENSKMMLELDPPFGDSYIVIGVGEKKITHHWHRSGSTIGKAFEATVRGAKRMAVLGDTAWDFGSVGGALNSLGKGIHQIFGAAFKSLFGGMSWFSQILIGTLLMWLGLNTKNGSISLMCLALGGVLIFLSTAVSA

SEQ ID NO: 1825 - protein, 93 aa, Zika virus; identical to SEQ ID NO: 1148

SEQ ID NO: 1826 - protein, 97 aa, Zika virus; identical to SEQ ID NO: 1149

SEQ ID NO: 1827 - protein, 93 aa, Zika virus; identical to SEQ ID NO: 1148

SEQ ID NO: 1828 - protein, 97 aa, Zika virus; identical to SEQ ID NO: 1149

SEQ ID NO: 1829 - protein, 93 aa, Zika virus; identical to SEQ ID NO: 1148

SEQ ID NO: 1830 - protein, 97 aa, Zika virus; identical to SEQ ID NO: 1149

SEQ ID NO: 1831 - protein, 93 aa, Zika virus; identical to SEQ ID NO: 1148

SEQ ID NO: 1832 - protein, 97 aa, Zika virus; identical to SEQ ID NO: 1149

SEQ ID NO: 1833 - protein, 93 aa, Zika virus; identical to SEQ ID NO: 1148

SEQ ID NO: 1834 - protein, 97 aa, Zika virus; identical to SEQ ID NO: 1149

SEQ ID NO: 1835 - protein, 93 aa, Zika virus; identical to SEQ ID NO: 1148

SEQ ID NO: 1836 - protein, 97 aa, Zika virus; identical to SEQ ID NO: 1149

SEQ ID NO: 1837 - protein, 93 aa, Zika virus; identical to SEQ ID NO: 1148

SEQ ID NO: 1838 - protein, 97 aa, Zika virus; identical to SEQ ID NO: 1149

SEQ ID NO: 1839 - protein, 301 aa, Zika virus; identical to SEQ ID NO: 1151

SEQ ID NO: 1840 - protein, 93 aa, Zika virus; identical to SEQ ID NO: 1148

SEQ ID NO: 1841 - protein, 97 aa, Zika virus; identical to SEQ ID NO: 1149

SEQ ID NO: 1842 - protein, 504 aa, Zika virus
IRCIGVSNRDFVEGMSGGTWVDVVLEHGGCVTVMAQDKPTVDIELVTTTVSNMAEVRSYCYEASISDMASDSRCPTQGEAYLDKQSDTQYVCKRTLVDRGWGNGCGLFGKGSLVTCAKFTCSKKMTGKSIQPENLEYRIMLSVHGSQHSGMIVNDTGYETDENRAKVEVTPNSPRAEATLGGFGSLGLDCEPRTGLDFSDLYYLTMNNKHWLVHKEWFHDIPLPWHAGADTGTPHWNNKEALVEFKDAHAKRQTVVVLGSQEGAVHTALAGALEAEMDGAKGKLFSGHLKCRLKMDKLRLKGVSYSLCTAAFTFTKVPAETLHGTVTVEVQYAGTDGPCKIPVQMAVDMQTLTPVGRLITANPVITESTENSKMMLELDPPFGDSYIVIGVGDKKITHHWHRSGSTIGKAFEATVRGAKRMAVLGDTAWDFGSVGGVFNSLGKGIHQIFGAAFKSLFGGMSWFSQILIGTLLVWLGLNTKNGSISLTCLALGGVMIFLSTAVSA

SEQ ID NO: 1843 - protein, 301 aa, Zika virus
RCIGVSNRDFVEGMSGGTWVDVVLEHGGCVTVMAQDKPTVDIELVTTTVSNMAEVRSYCYEASISDMASDSRCPTQGEAYLDKQSDTQYVCKRTLVDRGWGNGCGLFGKGSLVTCAKFTCSKKMTGKSIQPENLEYRIMLSVHGSQHSGMIVNDTGYETDENRAKVEVTPNSPRAEATLGGFGSLGLDCEPRTGLDFSDLYYLTMNNKHWLVHKEWFHDIPLPWHAGADTGTPHWNNKEALVEFKDAHAKRQTVVVLGSQEGAVHTALAGALEAEMDGAKGKLFSGHLKCRLKMDKLRLKG

SEQ ID NO: 1844 - protein, 93 aa, Zika virus; identical to SEQ ID NO: 1155

SEQ ID NO: 1845 - protein, 97 aa, Zika virus; identical to SEQ ID NO: 1156

SEQ ID NO: 1846 - protein, 301 aa, Zika virus; identical to SEQ ID NO: 1151

SEQ ID NO: 1847 - protein, 93 aa, Zika virus; identical to SEQ ID NO: 1148

SEQ ID NO: 1848 - protein, 97 aa, Zika virus; identical to SEQ ID NO: 1149

SEQ ID NO: 1849 - protein, 301 aa, Zika virus; identical to SEQ ID NO: 1151

SEQ ID NO: 1850 - protein, 93 aa, Zika virus; identical to SEQ ID NO: 1148

SEQ ID NO: 1851 - protein, 97 aa, Zika virus; identical to SEQ ID NO: 1149

SEQ ID NO: 1852 - protein, 301 aa, Zika virus; identical to SEQ ID NO: 1151

SEQ ID NO: 1853 - protein, 93 aa, Zika virus; identical to SEQ ID NO: 1148

SEQ ID NO: 1854 - protein, 97 aa, Zika virus; identical to SEQ ID NO: 1149

SEQ ID NO: 1855 - protein, 504 aa, Zika virus; identical to SEQ ID NO: 5

SEQ ID NO: 1856 - protein, 93 aa, Zika virus; identical to SEQ ID NO: 1148

SEQ ID NO: 1857 - protein, 97 aa, Zika virus; identical to SEQ ID NO: 1149

SEQ ID NO: 1858 - protein, 504 aa, Zika virus; identical to SEQ ID NO: 5

SEQ ID NO: 1859 - protein, 93 aa, Zika virus; identical to SEQ ID NO: 1148

SEQ ID NO: 1860 - protein, 97 aa, Zika virus; identical to SEQ ID NO: 1149

SEQ ID NO: 1861 - protein, 504 aa, Zika virus; identical to SEQ ID NO: 5

SEQ ID NO: 1862 - protein, 301 aa, Zika virus; identical to SEQ ID NO: 1151

SEQ ID NO: 1863 - protein, 93 aa, Zika virus; identical to SEQ ID NO: 1148

SEQ ID NO: 1864 - protein, 97 aa, Zika virus; identical to SEQ ID NO: 1149

SEQ ID NO: 1865 - protein, 504 aa, Zika virus; identical to SEQ ID NO: 5

SEQ ID NO: 1866 - protein, 93 aa, Zika virus; identical to SEQ ID NO: 1148

SEQ ID NO: 1867 - protein, 97 aa, Zika virus; identical to SEQ ID NO: 1149

SEQ ID NO: 1868 - protein, 504 aa, Zika virus; identical to SEQ ID NO: 5

SEQ ID NO: 1869 - protein, 93 aa, Zika virus; identical to SEQ ID NO: 1148

SEQ ID NO: 1870 - protein, 97 aa, Zika virus; identical to SEQ ID NO: 1149

SEQ ID NO: 1871 - protein, 504 aa, Zika virus; identical to SEQ ID NO: 5

SEQ ID NO: 1872 - protein, 301 aa, Zika virus; identical to SEQ ID NO: 1151

SEQ ID NO: 1873 - protein, 93 aa, Zika virus; identical to SEQ ID NO: 1148

SEQ ID NO: 1874 - protein, 97 aa, Zika virus; identical to SEQ ID NO: 1149

SEQ ID NO: 1875 - protein, 504 aa, Zika virus; identical to SEQ ID NO: 5

SEQ ID NO: 1876 - protein, 301 aa, Zika virus; identical to SEQ ID NO: 1151

SEQ ID NO: 1877 - protein, 93 aa, Zika virus; identical to SEQ ID NO: 1148

SEQ ID NO: 1878 - protein, 97 aa, Zika virus; identical to SEQ ID NO: 1149

SEQ ID NO: 1879 - protein, 504 aa, Zika virus; identical to SEQ ID NO: 5

SEQ ID NO: 1880 - protein, 93 aa, Zika virus; identical to SEQ ID NO: 1148

SEQ ID NO: 1881 - protein, 97 aa, Zika virus; identical to SEQ ID NO: 1149

SEQ ID NO: 1882 - protein, 504 aa, Zika virus; identical to SEQ ID NO: 5

SEQ ID NO: 1883 - protein, 301 aa, Zika virus; identical to SEQ ID NO: 1151

SEQ ID NO: 1884 - protein, 93 aa, Zika virus; identical to SEQ ID NO: 1148

SEQ ID NO: 1885 - protein, 97 aa, Zika virus; identical to SEQ ID NO: 1149

SEQ ID NO: 1886 - protein, 504 aa, Zika virus; identical to SEQ ID NO: 5

SEQ ID NO: 1887 - protein, 93 aa, Zika virus; identical to SEQ ID NO: 1148

SEQ ID NO: 1888 - protein, 97 aa, Zika virus; identical to SEQ ID NO: 1149

SEQ ID NO: 1889 - protein, 301 aa, Zika virus; identical to SEQ ID NO: 1151

SEQ ID NO: 1890 - protein, 93 aa, Zika virus; identical to SEQ ID NO: 1148

SEQ ID NO: 1891 - protein, 97 aa, Zika virus; identical to SEQ ID NO: 1149

SEQ ID NO: 1892 - protein, 301 aa, Zika virus; identical to SEQ ID NO: 1151

SEQ ID NO: 1893 - protein, 93 aa, Zika virus; identical to SEQ ID NO: 1148

SEQ ID NO: 1894 - protein, 97 aa, Zika virus; identical to SEQ ID NO: 1149

SEQ ID NO: 1895 - protein, 301 aa, Zika virus
RCIGVSNRDFVEGMSGGTWVDVVLEHGGCVTVMAQDKPTVDIELVTTTVSNMAEVRSYCYEASISDMASDSRCPTQGEAYLDRQSDTQYVCKRTLVDRGWGNGCGLFGKGSLVTCAKFACSKKMTGKSIQPENLEYRIMLSVHGSQHSGMIVNDTGHETDENRAKVEITPNSPRAEATLGGFGSLGLDCEPRTGLDFSDLYYLTMNNKHWLVHKEWFHDIPLPWHAGADTGTPHWNNKEALVEFKDAHAKRQTVVVLGNQEGAVHTALAGALEAEMDGAKGRLSSGHLKCRLKMDKLRLKG

SEQ ID NO: 1896 - protein, 93 aa, Zika virus; identical to SEQ ID NO: 1148

SEQ ID NO: 1897 - protein, 97 aa, Zika virus; identical to SEQ ID NO: 1149

SEQ ID NO: 1898 - protein, 504 aa, Zika virus; identical to SEQ ID NO: 5

SEQ ID NO: 1899 - protein, 301 aa, Zika virus; identical to SEQ ID NO: 1151

SEQ ID NO: 1900 - protein, 93 aa, Zika virus; identical to SEQ ID NO: 1148

SEQ ID NO: 1901 - protein, 97 aa, Zika virus; identical to SEQ ID NO: 1149

SEQ ID NO: 1902 - protein, 301 aa, Zika virus; identical to SEQ ID NO: 1151

SEQ ID NO: 1903 - protein, 93 aa, Zika virus; identical to SEQ ID NO: 1148

SEQ ID NO: 1904 - protein, 97 aa, Zika virus; identical to SEQ ID NO: 1149

SEQ ID NO: 1905 - protein, 301 aa, Zika virus; identical to SEQ ID NO: 1151

SEQ ID NO: 1906 - protein, 93 aa, Zika virus; identical to SEQ ID NO: 1148

SEQ ID NO: 1907 - protein, 97 aa, Zika virus; identical to SEQ ID NO: 1149

SEQ ID NO: 1908 - protein, 301 aa, Zika virus; identical to SEQ ID NO: 1151

SEQ ID NO: 1909 - protein, 93 aa, Zika virus; identical to SEQ ID NO: 1148

SEQ ID NO: 1910 - protein, 97 aa, Zika virus; identical to SEQ ID NO: 1811

SEQ ID NO: 1911 - protein, 301 aa, Zika virus; identical to SEQ ID NO: 1151

SEQ ID NO: 1912 - protein, 93 aa, Zika virus; identical to SEQ ID NO: 1148

SEQ ID NO: 1913 - protein, 97 aa, Zika virus; identical to SEQ ID NO: 1811

SEQ ID NO: 1914 - protein, 504 aa, Zika virus; identical to SEQ ID NO: 5

SEQ ID NO: 1915 - protein, 301 aa, Zika virus; identical to SEQ ID NO: 1151

SEQ ID NO: 1916 - protein, 93 aa, Zika virus; identical to SEQ ID NO: 1148

SEQ ID NO: 1917 - protein, 97 aa, Zika virus; identical to SEQ ID NO: 1149

SEQ ID NO: 1918 - protein, 93 aa, Zika virus; identical to SEQ ID NO: 1148

SEQ ID NO: 1919 - protein, 97 aa, Zika virus; identical to SEQ ID NO: 1149

SEQ ID NO: 1920 - protein, 301 aa, Zika virus
RCIGVSNRDFVEGMSGGTWVDVVLEHGGCVTVMAQDKPTVDIELVTTTVSNMAEVRSYCYEASISDMXSDSRCPTQGEAYLDKQSDTQYVCKRTLVDRGWGNGCGLFGKGSLVTCAKFACSKKMTGKSIQPENLEYRIMLSVHGSQHSGMIVNDTGHETDENRAKVEIXXXSPRAEATLGGFGSLGLDCEPRTGLDFSDLYYLTMNNKHWLVHKEWFHDIPLPWHAGADTGTPHWNNKEALVEFKDAHAKRQTVVVLGSQEGAVHTALAGALEAEMDGAKGRLSSGHLKCRLKMDKLRLKG

SEQ ID NO: 1921 - protein, 93 aa, Zika virus; identical to SEQ ID NO: 1148

SEQ ID NO: 1922 - protein, 97 aa, Zika virus
GKAXEATVRGAKRMAVLGDTAWDFGSVGGALNSLGKGIHQIFGAAFKSLFGGMSWFSQILIGTLLMWLGLNTKNGSISLMCLALGGVLIFLSTAVSA

SEQ ID NO: 1923 - protein, 93 aa, Zika virus; identical to SEQ ID NO: 1148

SEQ ID NO: 1924 - protein, 97 aa, Zika virus; identical to SEQ ID NO: 1149

SEQ ID NO: 1925 - protein, 93 aa, Zika virus; identical to SEQ ID NO: 1148

SEQ ID NO: 1926 - protein, 97 aa, Zika virus; identical to SEQ ID NO: 1149

SEQ ID NO: 1927 - protein, 93 aa, Zika virus; identical to SEQ ID NO: 1148

SEQ ID NO: 1928 - protein, 97 aa, Zika virus; identical to SEQ ID NO: 1149

SEQ ID NO: 1929 - protein, 93 aa, Zika virus; identical to SEQ ID NO: 1148

SEQ ID NO: 1930 - protein, 97 aa, Zika virus; identical to SEQ ID NO: 1149

SEQ ID NO: 1931 - protein, 301 aa, Zika virus; identical to SEQ ID NO: 1843

SEQ ID NO: 1932 - protein, 93 aa, Zika virus; identical to SEQ ID NO: 1155

SEQ ID NO: 1933 - protein, 97 aa, Zika virus; identical to SEQ ID NO: 1156

SEQ ID NO: 1934 - protein, 301 aa, Zika virus; identical to SEQ ID NO: 1151

SEQ ID NO: 1935 - protein, 93 aa, Zika virus; identical to SEQ ID NO: 1148

SEQ ID NO: 1936 - protein, 97 aa, Zika virus; identical to SEQ ID NO: 1149

SEQ ID NO: 1937 - protein, 301 aa, Zika virus; identical to SEQ ID NO: 1151

SEQ ID NO: 1938 - protein, 93 aa, Zika virus; identical to SEQ ID NO: 1148

SEQ ID NO: 1939 - protein, 97 aa, Zika virus; identical to SEQ ID NO: 1149

SEQ ID NO: 1940 - protein, 504 aa, Zika virus; identical to SEQ ID NO: 5

SEQ ID NO: 1941 - protein, 504 aa, Zika virus
IRCIGVSNRDFVEGMSGGTWVDVVLEHGGCVTVMAQDKPTVDIELVTTTVSNMAEVRSYCYEASISDMASDSRCPTQGEAYLDKQSDTQYVCKRTLVDRGWGNGCGLFGKGSLVTCAKFACSKKMTGKSIQPENLEYRIMLSVHGSQHSGMIVNDIGHETDENRAKVEITPNSPRAEATLGGFGSLGLDCEPRTGLDFSDLYYLTMNNKHWLVHKEWFHDIPLPWHAGADTGTPHWNNKEALVEFKDAHAKRQTVVVLGSQEGAVHTALAGALEAEMDGAKGRLSSGHLKCRLKMDKLRLKGVSYSLCTAAFTFTKIPAETLHGTVTVEVQYAGTDGPCKVPAQMAVDMQTLTPVGRLITANPVITESTENSKMMLELDPPFGDSYIVIGVGDKKITHHWHRSGSTIGKAFEATVRGAKRMAVLGDTAWDFGSVGGALNSLGKGIHQIFGAAFKSLFGGMSWFSQILIGTLLVWLGLNTKNGSISLTCLALGGVLIFLSTAVSA

SEQ ID NO: 1942 - protein, 504 aa, Zika virus
IRCIGVSNRDFVEGMSGGTWVDVVLEHGGCVTVMAQDKPTVDIELVTTTVSNMAEVRSYCYEASISDMASDSRCPTQGEAYLDKQSDTQYVCKRTLVDRGWGNGCGLFGKGSLVTCAKFACSKKMTGKSIQPENLEYRIMLSVHGSQHSGMIVNDTGHETDENRAKVEITPNSPRAEATLGGFGSLGLDCEPRTGLDFSDLYYLTMNNKHWLVHKEWFHDIPLPWHAGADTGTPHWNNKEALVEFKDAHAKRQTVVVLGSQEGAVHTALAGALEAEMDGAKGRLSSGHLKCRLKMDKLRLKGVSYSLCTAAFTFTKIPAETLHGTVTVEVQYAGTDGPCKVPAQMAVDMQTLTPVGRLITANPVITESTENSKMMLELDPPFGDSYIVIGVGEKKITHHWHRSGSTIGKAFEATVRGAKRMAVLGDTAWDFGSVGGALNSLGRGIHQIFGAAFKSLFGGMSWFSQILIGTLLMWLGLNTKNGSISLMCLALGGVLIFLSTAVSA

SEQ ID NO: 1943 - protein, 93 aa, Zika virus; identical to SEQ ID NO: 1148

SEQ ID NO: 1944 - protein, 97 aa, Zika virus; identical to SEQ ID NO: 1149

SEQ ID NO: 1945 - protein, 504 aa, Zika virus
IRCIGVSNRDFVEGMSGGTWVDVVLEHGGCVTVMAQDKPTVDIELVTTTVSNMAEVRSYCYEASISDMASDSRCPTQGEAYLDKQSDTQYVCKRTLVDRGWGNGCGLFGKGSLVTCAKFTCSKKMTGKSIQPENLEYRIMLSVHGSQHSGMIVNDTGHETDENRAKVEVTPNSPRAEATLGGFGSLGLDCEPRTGLDFSDLYYLTMNNKHWLVHKEWFHDIPLPWHAGADTGTPHWNNKEALVEFKDAHAKRQTVVVLGSQEGAVHTALAGALEAEMDGAKGRLFSGHLKCRLKMDKLRLKGVSYSLCTAAFTFTKVPAETLHGTVTVEVQYAGTDGPCKVPAQMAVDMQTLTPVGRLITANPVITESTENSKMMLELDPPFGDSYIVIGVGDKKITHHWHRSGSTIGKAFEATVRGAKRMAVLGDTAWDFGSVGGVFNSLGKGIHQIFGAAFKSLFGGMSWFSQILIGTLLVWLGLNTKNGSISLTCLALGGVMIFLSTAVSA

SEQ ID NO: 1946 - protein, 93 aa, Zika virus; identical to SEQ ID NO: 1217

SEQ ID NO: 1947 - protein, 97 aa, Zika virus; identical to SEQ ID NO: 1156

SEQ ID NO: 1948 - protein, 504 aa, Zika virus
IRCIGVSNRDFVEGMSGGTWVDVVLEHGGCVTVMAQDKPTVDIELVTTTVSNMAEVRSYCYEASISDMASDSRCPTQGEAYLDKQSDTQYVCKRTLVDRGWGNGCGLFGKGSLVTCAKFACSKKMTGKSIQPENLEYRIMLSVHGSQHSGMIVNDTGHETDENRAKVEITPNSPRAEATLGGFGSLGLDCEPRTGLDFSDLYYLTMNNKHWLVHKEWFHDIPLPWHAGADTGTPHWNNKEALVEFKDAHAKRQTVVVLGSQEGAVHTALAGALEAEMDGAKGRLSSGHLKCRLKMDKLRLKGVSYSLCTAAFTFTKIPAETLHGTVTVEVQYAGTDGPCKVPAQMAVDMQTLTPVGRLITANPVITESTENSKMMLELDPPFGDSYIVIGVGDKKITHHWYRSGSTIGKAFEATVRGAKRMAVLGDTAWDFGSVGGALNSLGKGIHQIFGAAFKSLFGGMSWFSQILIGTLLVWLGLNTKNGSISLTCLALGGVLIFLSTAVSA

SEQ ID NO: 1949 - protein, 504 aa, Zika virus; identical to SEQ ID NO: 1406

SEQ ID NO: 1950 - protein, 93 aa, Zika virus; identical to SEQ ID NO: 1327

SEQ ID NO: 1951 - protein, 97 aa, Zika virus; identical to SEQ ID NO: 1149

SEQ ID NO: 1952 - protein, 500 aa, Zika virus; identical to SEQ ID NO: 1551

SEQ ID NO: 1953 - protein, 93 aa, Zika virus; identical to SEQ ID NO: 1155

SEQ ID NO: 1954 - protein, 97 aa, Zika virus; identical to SEQ ID NO: 1156

SEQ ID NO: 1955 - protein, 301 aa, Zika virus; identical to SEQ ID NO: 1151

SEQ ID NO: 1956 - protein, 93 aa, Zika virus; identical to SEQ ID NO: 1148

SEQ ID NO: 1957 - protein, 97 aa, Zika virus; identical to SEQ ID NO: 1149

SEQ ID NO: 1958 - protein, 504 aa, Zika virus; identical to SEQ ID NO: 5

SEQ ID NO: 1959 - protein, 504 aa, Zika virus; identical to SEQ ID NO: 5

SEQ ID NO: 1960 - protein, 301 aa, Zika virus; identical to SEQ ID NO: 1151

SEQ ID NO: 1961 - protein, 93 aa, Zika virus; identical to SEQ ID NO: 1148

SEQ ID NO: 1962 - protein, 97 aa, Zika virus; identical to SEQ ID NO: 1149

SEQ ID NO: 1963 - protein, 93 aa, Zika virus; identical to SEQ ID NO: 1148

SEQ ID NO: 1964 - protein, 97 aa, Zika virus; identical to SEQ ID NO: 1149

SEQ ID NO: 1965 - protein, 93 aa, Zika virus; identical to SEQ ID NO: 1148

SEQ ID NO: 1966 - protein, 97 aa, Zika virus; identical to SEQ ID NO: 1149

SEQ ID NO: 1967 - protein, 301 aa, Zika virus; identical to SEQ ID NO: 1151

SEQ ID NO: 1968 - protein, 93 aa, Zika virus; identical to SEQ ID NO: 1148

SEQ ID NO: 1969 - protein, 97 aa, Zika virus; identical to SEQ ID NO: 1811

SEQ ID NO: 1970 - protein, 504 aa, Zika virus; identical to SEQ ID NO: 1945

SEQ ID NO: 1971 - protein, 504 aa, Zika virus; identical to SEQ ID NO: 5

SEQ ID NO: 1972 - protein, 301 aa, Zika virus; identical to SEQ ID NO: 1151

SEQ ID NO: 1973 - protein, 93 aa, Zika virus; identical to SEQ ID NO: 1148

SEQ ID NO: 1974 - protein, 97 aa, Zika virus; identical to SEQ ID NO: 1149

SEQ ID NO: 1975 - protein, 504 aa, Zika virus; identical to SEQ ID NO: 5

SEQ ID NO: 1976 - protein, 301 aa, Zika virus; identical to SEQ ID NO: 1151

SEQ ID NO: 1977 - protein, 93 aa, Zika virus; identical to SEQ ID NO: 1148

SEQ ID NO: 1978 - protein, 97 aa, Zika virus; identical to SEQ ID NO: 1149

SEQ ID NO: 1979 - protein, 504 aa, Zika virus; identical to SEQ ID NO: 5

SEQ ID NO: 1980 - protein, 93 aa, Zika virus; identical to SEQ ID NO: 1148

SEQ ID NO: 1981 - protein, 97 aa, Zika virus; identical to SEQ ID NO: 1149

SEQ ID NO: 1982 - protein, 504 aa, Zika virus; identical to SEQ ID NO: 5

SEQ ID NO: 1983 - protein, 301 aa, Zika virus; identical to SEQ ID NO: 1151

SEQ ID NO: 1984 - protein, 93 aa, Zika virus; identical to SEQ ID NO: 1148

SEQ ID NO: 1985 - protein, 97 aa, Zika virus; identical to SEQ ID NO: 1811

SEQ ID NO: 1986 - protein, 93 aa, Zika virus; identical to SEQ ID NO: 1148

SEQ ID NO: 1987 - protein, 97 aa, Zika virus; identical to SEQ ID NO: 1149

SEQ ID NO: 1988 - protein, 93 aa, Zika virus; identical to SEQ ID NO: 1217

SEQ ID NO: 1989 - protein, 97 aa, Zika virus; identical to SEQ ID NO: 1156

SEQ ID NO: 1990 - protein, 93 aa, Zika virus; identical to SEQ ID NO: 1217

SEQ ID NO: 1991 - protein, 97 aa, Zika virus; identical to SEQ ID NO: 1156

SEQ ID NO: 1992 - protein, 93 aa, Zika virus; identical to SEQ ID NO: 1148

SEQ ID NO: 1993 - protein, 97 aa, Zika virus; identical to SEQ ID NO: 1208

SEQ ID NO: 1994 - protein, 93 aa, Zika virus; identical to SEQ ID NO: 1155

SEQ ID NO: 1995 - protein, 97 aa, Zika virus; identical to SEQ ID NO: 1156

SEQ ID NO: 1996 - protein, 93 aa, Zika virus; identical to SEQ ID NO: 1217

SEQ ID NO: 1997 - protein, 97 aa, Zika virus; identical to SEQ ID NO: 1156

SEQ ID NO: 1998 - protein, 93 aa, Zika virus; identical to SEQ ID NO: 1195

SEQ ID NO: 1999 - protein, 97 aa, Zika virus; identical to SEQ ID NO: 1149

SEQ ID NO: 2000 - protein, 504 aa, Zika virus; identical to SEQ ID NO: 5

SEQ ID NO: 2001 - protein, 93 aa, Zika virus; identical to SEQ ID NO: 1148

SEQ ID NO: 2002 - protein, 97 aa, Zika virus; identical to SEQ ID NO: 1149

SEQ ID NO: 2003 - protein, 504 aa, Zika virus
IRCIGVSNRDFVEGMSGGTWVDVVLEHGGCVTVMAQDKPTVDIELVTTTVSNMAEVRSYCYEASISDMASDSRCPTQGEAYLDKQSDTQYVCKRTLVDRGWGNGCGLFGKGSLVTCAKFACSKKMTGKSIQPENLEYRIMLSVHGSQHSGMIVNDTGHETDENRAKVEITPNSPRAEATLGGFGSLGLDCEPRTGLDFSDLYYLTMNNKHWLVHKEWFHDIPLPWHAGADTGTPHWNNKEALVEFKDAHAKRQTVVVLGSQEGAVHTALAGALEAEMDGAKGRLSSGHLKCRLKMDKLRLKGVSYSLCTAAFTFTKIPAETLHGTVTVEVQYAGADGPCKVPAQMAVDMQTLTPVGRLITANPVITESTENSKMMLELDPPFGDSYIVIGVGEKKITHHWHRSGSTIGKAFEATVRGAKRMAVLGDTAWDFGSVGGALNSLGKGIHQIFGAAFKSLFGGMSWFSQILIGTLLMWLGLNTKNGSISLMCLALGGVLIFLSTAVSA

SEQ ID NO: 2004 - protein, 93 aa, Zika virus
AFTFTKIPAETLHGTVTVEVQYAGADGPCKVPAQMAVDMQTLTPVGRLITANPVITESTENSKMMLELDPPFGDSYIVIGVGEKKITHHWHRS

SEQ ID NO: 2005 - protein, 97 aa, Zika virus; identical to SEQ ID NO: 1149

SEQ ID NO: 2006 - protein, 504 aa, Zika virus; identical to SEQ ID NO: 5

SEQ ID NO: 2007 - protein, 93 aa, Zika virus; identical to SEQ ID NO: 1148

SEQ ID NO: 2008 - protein, 97 aa, Zika virus; identical to SEQ ID NO: 1149

SEQ ID NO: 2009 - protein, 504 aa, Zika virus; identical to SEQ ID NO: 5

SEQ ID NO: 2010 - protein, 93 aa, Zika virus; identical to SEQ ID NO: 1148

SEQ ID NO: 2011 - protein, 97 aa, Zika virus; identical to SEQ ID NO: 1149

SEQ ID NO: 2012 - protein, 93 aa, Zika virus; identical to SEQ ID NO: 1148

SEQ ID NO: 2013 - protein, 97 aa, Zika virus; identical to SEQ ID NO: 1149

SEQ ID NO: 2014 - protein, 93 aa, Zika virus; identical to SEQ ID NO: 1148

SEQ ID NO: 2015 - protein, 97 aa, Zika virus; identical to SEQ ID NO: 1149

SEQ ID NO: 2016 - protein, 301 aa, Zika virus; identical to SEQ ID NO: 1151

SEQ ID NO: 2017 - protein, 93 aa, Zika virus; identical to SEQ ID NO: 1148

SEQ ID NO: 2018 - protein, 97 aa, Zika virus; identical to SEQ ID NO: 1811

SEQ ID NO: 2019 - protein, 93 aa, Zika virus
AFTFTKIPAETVDGTVTVEGQYGGTDGPCKVPAQMAVDMQTLTPVGRLITANPVITESTENSKMMLELDPPFGDSYIVIGVGEKKITHHWHRS

SEQ ID NO: 2020 - protein, 97 aa, Zika virus
GKAFEATVRGAKRMAVLGDTAWDFGSVGGALNSLGKGIHQIIGAAFKSLFGGMSWFSQILIGTLLMWLGLNTKNGSISLMCLALGGVLIFLSTAVSG

SEQ ID NO: 2021 - protein, 93 aa, Zika virus; identical to SEQ ID NO: 1148

SEQ ID NO: 2022 - protein, 97 aa, Zika virus; identical to SEQ ID NO: 1149

SEQ ID NO: 2023 - protein, 93 aa, Zika virus; identical to SEQ ID NO: 1148

SEQ ID NO: 2024 - protein, 97 aa, Zika virus; identical to SEQ ID NO: 1149

SEQ ID NO: 2025 - protein, 301 aa, Zika virus; identical to SEQ ID NO: 1151

SEQ ID NO: 2026 - protein, 93 aa, Zika virus; identical to SEQ ID NO: 1148

SEQ ID NO: 2027 - protein, 97 aa, Zika virus; identical to SEQ ID NO: 1149

SEQ ID NO: 2028 - protein, 301 aa, Zika virus; identical to SEQ ID NO: 1400

SEQ ID NO: 2029 - protein, 93 aa, Zika virus; identical to SEQ ID NO: 1401

SEQ ID NO: 2030 - protein, 97 aa, Zika virus; identical to SEQ ID NO: 1402

SEQ ID NO: 2031 - protein, 93 aa, Zika virus; identical to SEQ ID NO: 1148

SEQ ID NO: 2032 - protein, 97 aa, Zika virus; identical to SEQ ID NO: 1172

SEQ ID NO: 2033 - protein, 93 aa, Zika virus; identical to SEQ ID NO: 1148

SEQ ID NO: 2034 - protein, 97 aa, Zika virus; identical to SEQ ID NO: 1149

SEQ ID NO: 2035 - protein, 93 aa, Zika virus; identical to SEQ ID NO: 1148

SEQ ID NO: 2036 - protein, 97 aa, Zika virus; identical to SEQ ID NO: 1149

SEQ ID NO: 2037 - protein, 301 aa, Zika virus; identical to SEQ ID NO: 1397

SEQ ID NO: 2038 - protein, 93 aa, Zika virus; identical to SEQ ID NO: 1148

SEQ ID NO: 2039 - protein, 97 aa, Zika virus; identical to SEQ ID NO: 1149

SEQ ID NO: 2040 - protein, 93 aa, Zika virus; identical to SEQ ID NO: 1155

SEQ ID NO: 2041 - protein, 97 aa, Zika virus; identical to SEQ ID NO: 1156

SEQ ID NO: 2042 - protein, 93 aa, Zika virus; identical to SEQ ID NO: 1148

SEQ ID NO: 2043 - protein, 97 aa, Zika virus; identical to SEQ ID NO: 1149

SEQ ID NO: 2044 - protein, 93 aa, Zika virus; identical to SEQ ID NO: 1155

SEQ ID NO: 2045 - protein, 97 aa, Zika virus; identical to SEQ ID NO: 1156

SEQ ID NO: 2046 - protein, 168 aa, Zika virus; identical to SEQ ID NO: 4

SEQ ID NO: 2047 - protein, 88 aa, Zika virus
RRGSAYYMYLDRNDAGEAISFPTTLGMNKCYIQIMDLGHMCDATMSYECPMLDEGVEPDDVDCWCNTTSTWVVYGTCHHKKGEARRSR

SEQ ID NO: 2048 - protein, 74 aa, Zika virus
VTLPSHSTRKLQTRSQTWLESREYTKHLIRVENWIFRNPGFALAAAAIAWLLGSSTSQKVIYLVMILLIAPAYS

SEQ ID NO: 2049 - protein, 75 aa, Zika virus
AVTLPSHSTRKLQTRSQTWLESREYTKHLIRVENWIFRNPGFALAAAAIAWLLGSSTSQKVIYLVMILLIAPAYS

SEQ ID NO: 2050 - protein, 168 aa, Zika virus; identical to SEQ ID NO: 4

SEQ ID NO: 2051 - protein, 93 aa, Zika virus
AEVTRRGSAYYMYLDRNDAGEAISFPTTLGMNKCYIQIMDLGHMCDATMSYECPMLDEGVEPDDVDCWCNTTSTWVVYGTCHHKKGEARRSRR

SEQ ID NO: 2052 - protein, 88 aa, Zika virus; identical to SEQ ID NO: 2047

SEQ ID NO: 2053 - protein, 75 aa, Zika virus; identical to SEQ ID NO: 2049

SEQ ID NO: 2054 - protein, 74 aa, Zika virus; identical to SEQ ID NO: 2048

SEQ ID NO: 2055 - protein, 168 aa, Zika virus
AEITRRGSAYYMYLDRSDAGKAISFATTLGVNKCHVQIMDLGHMCDATMSYECPMLDEGVEPDDVDCWCNTTSTWVVYGTCHHKKGEARRSRRAVTLPSHSTRKLQTRSQTWLESREYTKHLIKVENWIFRNPGFALVAVAIAWLLGSSTSQKVIYLVMILLIAPAYS

SEQ ID NO: 2056 - protein, 87 aa, Zika virus
RGSAYYMYLDRSDAGKAISFATTLGVNKCHVQIMDLGHMCDATMSYECPMLDEGVEPDDVDCWCNTTSTWVVYGTCHHKKGEARRSR

SEQ ID NO: 2057 - protein, 74 aa, Zika virus
VTLPSHSTRKLQTRSQTWLESREYTKHLIKVENWIFRNPGFALVAVAIAWLLGSSTSQKVIYLVMILLIAPAYS

SEQ ID NO: 2058 - protein, 75 aa, Zika virus
AVTLPSHSTRKLQTRSQTWLESREYTKHLIKVENWIFRNPGFALVAVAIAWLLGSSTSQKVIYLVMILLIAPAYS

SEQ ID NO: 2059 - protein, 74 aa, Zika virus; identical to SEQ ID NO: 2057

SEQ ID NO: 2060 - protein, 93 aa, Zika virus
AEITRRGSAYYMYLDRSDAGKAISFATTLGVNKCHVQIMDLGHMCDATMSYECPMLDEGVEPDDVDCWCNTTSTWVVYGTCHHKKGEARRSRR

SEQ ID NO: 2061 - protein, 77 aa, Zika virus
RRGSAYYMYLDRSDAGKAISFATTLGVNKCHVQIMDLGHMCDATMSYECPMLDEGVEPDDVDCWCNTTSTWVVYGTC

SEQ ID NO: 2062 - protein, 75 aa, Zika virus; identical to SEQ ID NO: 2058

SEQ ID NO: 2063 - protein, 168 aa, Zika virus; identical to SEQ ID NO: 4

SEQ ID NO: 2064 - protein, 93 aa, Zika virus; identical to SEQ ID NO: 2051

SEQ ID NO: 2065 - protein, 77 aa, Zika virus
RRGSAYYMYLDRNDAGEAISFPTTLGMNKCYIQIMDLGHMCDATMSYECPMLDEGVEPDDVDCWCNTTSTWVVYGTC

SEQ ID NO: 2066 - protein, 75 aa, Zika virus; identical to SEQ ID NO: 2049

SEQ ID NO: 2067 - protein, 168 aa, Zika virus; identical to SEQ ID NO: 4

SEQ ID NO: 2068 - protein, 93 aa, Zika virus; identical to SEQ ID NO: 2051

SEQ ID NO: 2069 - protein, 77 aa, Zika virus; identical to SEQ ID NO: 2065

SEQ ID NO: 2070 - protein, 75 aa, Zika virus; identical to SEQ ID NO: 2049

SEQ ID NO: 2071 - protein, 168 aa, Zika virus; identical to SEQ ID NO: 4

SEQ ID NO: 2072 - protein, 93 aa, Zika virus; identical to SEQ ID NO: 2051

SEQ ID NO: 2073 - protein, 75 aa, Zika virus; identical to SEQ ID NO: 2049

SEQ ID NO: 2074 - protein, 168 aa, Zika virus; identical to SEQ ID NO: 4

SEQ ID NO: 2075 - protein, 93 aa, Zika virus; identical to SEQ ID NO: 2051

SEQ ID NO: 2076 - protein, 77 aa, Zika virus; identical to SEQ ID NO: 2065

SEQ ID NO: 2077 - protein, 75 aa, Zika virus; identical to SEQ ID NO: 2049

SEQ ID NO: 2078 - protein, 168 aa, Zika virus
VEVTRRGSAYYMYLDRSNAGETISFPTTLGVNKCYIQIMDLGHMCDATMSYECPMLDEGVEPDDVDCWCNTTSTWVVYGTCHHKKGEARRSRRAVTLPSHSTRKLQTRSQTWLESREYTKHLIRVENWIFRNPGFALAAAAIAWLLGSSTSQKVIYLVMILLIAPAYS

SEQ ID NO: 2079 - protein, 93 aa, Zika virus
VEVTRRGSAYYMYLDRSNAGETISFPTTLGVNKCYIQIMDLGHMCDATMSYECPMLDEGVEPDDVDCWCNTTSTWVVYGTCHHKKGEARRSRR

SEQ ID NO: 2080 - protein, 77 aa, Zika virus
RRGSAYYMYLDRSNAGETISFPTTLGVNKCYIQIMDLGHMCDATMSYECPMLDEGVEPDDVDCWCNTTSTWVVYGTC

SEQ ID NO: 2081 - protein, 75 aa, Zika virus; identical to SEQ ID NO: 2049

SEQ ID NO: 2082 - protein, 168 aa, Zika virus
AEVTRRGSAYYMYLDRSDAGEAISFPTTLGMNKCYIQIMDLGHMCDATMSYECPMLDEGVEPDDVDCWCNTTSTWVVYGTCHHKKGEARRSRRAVTLPSHSTRKLQTRSQTWLESREYTKHLIRVENWIFRNPGFALAAAAIAWLLGSSTSQKVIYLVMILLIAPAYS

SEQ ID NO: 2083 - protein, 93 aa, Zika virus
AEVTRRGSAYYMYLDRSDAGEAISFPTTLGMNKCYIQIMDLGHMCDATMSYECPMLDEGVEPDDVDCWCNTTSTWVVYGTCHHKKGEARRSRR

SEQ ID NO: 2084 - protein, 77 aa, Zika virus
RRGSAYYMYLDRSDAGEAISFPTTLGMNKCYIQIMDLGHMCDATMSYECPMLDEGVEPDDVDCWCNTTSTWVVYGTC

SEQ ID NO: 2085 - protein, 75 aa, Zika virus; identical to SEQ ID NO: 2049

SEQ ID NO: 2086 - protein, 168 aa, Zika virus; identical to SEQ ID NO: 2082

SEQ ID NO: 2087 - protein, 93 aa, Zika virus; identical to SEQ ID NO: 2083

SEQ ID NO: 2088 - protein, 77 aa, Zika virus; identical to SEQ ID NO: 2084

SEQ ID NO: 2089 - protein, 75 aa, Zika virus; identical to SEQ ID NO: 2049

SEQ ID NO: 2090 - protein, 168 aa, Zika virus; identical to SEQ ID NO: 2082

SEQ ID NO: 2091 - protein, 93 aa, Zika virus; identical to SEQ ID NO: 2083

SEQ ID NO: 2092 - protein, 77 aa, Zika virus; identical to SEQ ID NO: 2084

SEQ ID NO: 2093 - protein, 75 aa, Zika virus; identical to SEQ ID NO: 2049

SEQ ID NO: 2094 - protein, 168 aa, Zika virus
AEVTRRGSAYYMYLDRSDAGEAISFPTTLGMNKCYIQIMDLGHMCDATMSYECPMLDEGVEPDDVDCWCNTTSTWVVYGTCHHKKGEARRSRRAVTLPSHSTRKLQTRSQTWLESREYTKHLIRVENWIFRNPGFALAAAAIAWLLGSSTSQKVIYLIMILLIAPAYS

SEQ ID NO: 2095 - protein, 93 aa, Zika virus; identical to SEQ ID NO: 2083

SEQ ID NO: 2096 - protein, 77 aa, Zika virus; identical to SEQ ID NO: 2084

SEQ ID NO: 2097 - protein, 75 aa, Zika virus
AVTLPSHSTRKLQTRSQTWLESREYTKHLIRVENWIFRNPGFALAAAAIAWLLGSSTSQKVIYLIMILLIAPAYS

SEQ ID NO: 2098 - protein, 168 aa, Zika virus; identical to SEQ ID NO: 2094

SEQ ID NO: 2099 - protein, 93 aa, Zika virus; identical to SEQ ID NO: 2083

SEQ ID NO: 2100 - protein, 77 aa, Zika virus; identical to SEQ ID NO: 2084

SEQ ID NO: 2101 - protein, 75 aa, Zika virus; identical to SEQ ID NO: 2097

SEQ ID NO: 2102 - protein, 168 aa, Zika virus; identical to SEQ ID NO: 2082

SEQ ID NO: 2103 - protein, 93 aa, Zika virus; identical to SEQ ID NO: 2083

SEQ ID NO: 2104 - protein, 77 aa, Zika virus; identical to SEQ ID NO: 2084

SEQ ID NO: 2105 - protein, 75 aa, Zika virus; identical to SEQ ID NO: 2049

SEQ ID NO: 2106 - protein, 168 aa, Zika virus; identical to SEQ ID NO: 2082

SEQ ID NO: 2107 - protein, 93 aa, Zika virus; identical to SEQ ID NO: 2083

SEQ ID NO: 2108 - protein, 77 aa, Zika virus; identical to SEQ ID NO: 2084

SEQ ID NO: 2109 - protein, 75 aa, Zika virus; identical to SEQ ID NO: 2049

SEQ ID NO: 2110 - protein, 168 aa, Zika virus; identical to SEQ ID NO: 2082

SEQ ID NO: 2111 - protein, 93 aa, Zika virus; identical to SEQ ID NO: 2083

SEQ ID NO: 2112 - protein, 77 aa, Zika virus; identical to SEQ ID NO: 2084

SEQ ID NO: 2113 - protein, 75 aa, Zika virus; identical to SEQ ID NO: 2049

SEQ ID NO: 2114 - protein, 168 aa, Zika virus; identical to SEQ ID NO: 2082

SEQ ID NO: 2115 - protein, 93 aa, Zika virus; identical to SEQ ID NO: 2083

SEQ ID NO: 2116 - protein, 77 aa, Zika virus; identical to SEQ ID NO: 2084

SEQ ID NO: 2117 - protein, 75 aa, Zika virus; identical to SEQ ID NO: 2049

SEQ ID NO: 2118 - protein, 168 aa, Zika virus; identical to SEQ ID NO: 2082

SEQ ID NO: 2119 - protein, 93 aa, Zika virus; identical to SEQ ID NO: 2083

SEQ ID NO: 2120 - protein, 77 aa, Zika virus; identical to SEQ ID NO: 2084

SEQ ID NO: 2121 - protein, 75 aa, Zika virus; identical to SEQ ID NO: 2049

SEQ ID NO: 2122 - protein, 168 aa, Zika virus; identical to SEQ ID NO: 2082

SEQ ID NO: 2123 - protein, 93 aa, Zika virus; identical to SEQ ID NO: 2083

SEQ ID NO: 2124 - protein, 77 aa, Zika virus; identical to SEQ ID NO: 2084

SEQ ID NO: 2125 - protein, 75 aa, Zika virus; identical to SEQ ID NO: 2049

SEQ ID NO: 2126 - protein, 168 aa, Zika virus
VEVTRRGSAYYMYLDRSDAGEAISFPTTLGMNKCYIQIMDLGHMCDATMSYECPMLDEGVEPDDVDCWCNTTSTWVVYGTCHHKKGEARRSRRAVTLPSHSTRKLQTRSQTWLESREYTKHLIRVENWIFRNPGFALAAAAIAWLLGSSTSQKVIYLVMILLIAPAYS

SEQ ID NO: 2127 - protein, 93 aa, Zika virus
VEVTRRGSAYYMYLDRSDAGEAISFPTTLGMNKCYIQIMDLGHMCDATMSYECPMLDEGVEPDDVDCWCNTTSTWVVYGTCHHKKGEARRSRR

SEQ ID NO: 2128 - protein, 77 aa, Zika virus; identical to SEQ ID NO: 2084

SEQ ID NO: 2129 - protein, 75 aa, Zika virus; identical to SEQ ID NO: 2049

SEQ ID NO: 2130 - protein, 168 aa, Zika virus; identical to SEQ ID NO: 2082

SEQ ID NO: 2131 - protein, 93 aa, Zika virus; identical to SEQ ID NO: 2083

SEQ ID NO: 2132 - protein, 77 aa, Zika virus; identical to SEQ ID NO: 2084

SEQ ID NO: 2133 - protein, 75 aa, Zika virus; identical to SEQ ID NO: 2049

SEQ ID NO: 2134 - protein, 168 aa, Zika virus; identical to SEQ ID NO: 2126

SEQ ID NO: 2135 - protein, 93 aa, Zika virus; identical to SEQ ID NO: 2127

SEQ ID NO: 2136 - protein, 77 aa, Zika virus; identical to SEQ ID NO: 2084

SEQ ID NO: 2137 - protein, 75 aa, Zika virus; identical to SEQ ID NO: 2049

SEQ ID NO: 2138 - protein, 77 aa, Zika virus; identical to SEQ ID NO: 2084

SEQ ID NO: 2139 - protein, 77 aa, Zika virus; identical to SEQ ID NO: 2061

SEQ ID NO: 2140 - protein, 77 aa, Zika virus; identical to SEQ ID NO: 2065

SEQ ID NO: 2141 - protein, 77 aa, Zika virus; identical to SEQ ID NO: 2065

SEQ ID NO: 2142 - protein, 168 aa, Zika virus; identical to SEQ ID NO: 2126

SEQ ID NO: 2143 - protein, 93 aa, Zika virus; identical to SEQ ID NO: 2127

SEQ ID NO: 2144 - protein, 77 aa, Zika virus; identical to SEQ ID NO: 2084

SEQ ID NO: 2145 - protein, 75 aa, Zika virus; identical to SEQ ID NO: 2049

SEQ ID NO: 2146 - protein, 77 aa, Zika virus; identical to SEQ ID NO: 2065

SEQ ID NO: 2147 - protein, 77 aa, Zika virus; identical to SEQ ID NO: 2065

SEQ ID NO: 2148 - protein, 168 aa, Zika virus; identical to SEQ ID NO: 4

SEQ ID NO: 2149 - protein, 93 aa, Zika virus; identical to SEQ ID NO: 2051

SEQ ID NO: 2150 - protein, 77 aa, Zika virus; identical to SEQ ID NO: 2065

SEQ ID NO: 2151 - protein, 75 aa, Zika virus; identical to SEQ ID NO: 2049

SEQ ID NO: 2152 - protein, 168 aa, Zika virus
AEVTRRGSAYYMYLDRNDAGEAISFPTTLGMNKCYIQIMDLGHMCDATMSYECPTLDEGVEPDDVDCWCNTTSTWVVYGTCHHKKGEARRSRRAVTLPSHSTRKLQTRSQTWLESREYTKHLIRVENWIFRKPGFALAAAAIAWLLGSSTSQKVIYLVMILLIAPAYS

SEQ ID NO: 2153 - protein, 93 aa, Zika virus
AEVTRRGSAYYMYLDRNDAGEAISFPTTLGMNKCYIQIMDLGHMCDATMSYECPTLDEGVEPDDVDCWCNTTSTWVVYGTCHHKKGEARRSRR

SEQ ID NO: 2154 - protein, 77 aa, Zika virus
RRGSAYYMYLDRNDAGEAISFPTTLGMNKCYIQIMDLGHMCDATMSYECPTLDEGVEPDDVDCWCNTTSTWVVYGTC

SEQ ID NO: 2155 - protein, 75 aa, Zika virus
AVTLPSHSTRKLQTRSQTWLESREYTKHLIRVENWIFRKPGFALAAAAIAWLLGSSTSQKVIYLVMILLIAPAYS

SEQ ID NO: 2156 - protein, 168 aa, Zika virus
AEVTRRGSAYYMYLDRNDAGEAISFPTTLGMNKCYIQIMDLGHMCDATMSYECPTLDEGVEPDDVDCWCNTTSTWVVYGTCHHKKGEARRSRRAVTLPSHSTRKLQTRSQTWLESREYTKHLIRVENWIFRNPGFALAAAAIAWLLGSSTSQKVIYLVMILLIAPAYS

SEQ ID NO: 2157 - protein, 93 aa, Zika virus; identical to SEQ ID NO: 2153

SEQ ID NO: 2158 - protein, 77 aa, Zika virus; identical to SEQ ID NO: 2154

SEQ ID NO: 2159 - protein, 75 aa, Zika virus; identical to SEQ ID NO: 2049

SEQ ID NO: 2160 - protein, 168 aa, Zika virus; identical to SEQ ID NO: 2152

SEQ ID NO: 2161 - protein, 93 aa, Zika virus; identical to SEQ ID NO: 2153

SEQ ID NO: 2162 - protein, 77 aa, Zika virus; identical to SEQ ID NO: 2154

SEQ ID NO: 2163 - protein, 75 aa, Zika virus; identical to SEQ ID NO: 2155

SEQ ID NO: 2164 - protein, 168 aa, Zika virus; identical to SEQ ID NO: 2152

SEQ ID NO: 2165 - protein, 93 aa, Zika virus; identical to SEQ ID NO: 2153

SEQ ID NO: 2166 - protein, 77 aa, Zika virus; identical to SEQ ID NO: 2154

SEQ ID NO: 2167 - protein, 75 aa, Zika virus; identical to SEQ ID NO: 2155

SEQ ID NO: 2168 - protein, 77 aa, Zika virus; identical to SEQ ID NO: 2065

SEQ ID NO: 2169 - protein, 77 aa, Zika virus; identical to SEQ ID NO: 2065

SEQ ID NO: 2170 - protein, 77 aa, Zika virus; identical to SEQ ID NO: 2065

SEQ ID NO: 2171 - protein, 77 aa, Zika virus; identical to SEQ ID NO: 2065

SEQ ID NO: 2172 - protein, 168 aa, Zika virus; identical to SEQ ID NO: 2082

SEQ ID NO: 2173 - protein, 93 aa, Zika virus; identical to SEQ ID NO: 2083

SEQ ID NO: 2174 - protein, 77 aa, Zika virus; identical to SEQ ID NO: 2084

SEQ ID NO: 2175 - protein, 75 aa, Zika virus; identical to SEQ ID NO: 2049

SEQ ID NO: 2176 - protein, 168 aa, Zika virus; identical to SEQ ID NO: 4

SEQ ID NO: 2177 - protein, 93 aa, Zika virus; identical to SEQ ID NO: 2051

SEQ ID NO: 2178 - protein, 77 aa, Zika virus; identical to SEQ ID NO: 2065

SEQ ID NO: 2179 - protein, 75 aa, Zika virus; identical to SEQ ID NO: 2049

SEQ ID NO: 2180 - protein, 168 aa, Zika virus; identical to SEQ ID NO: 4

SEQ ID NO: 2181 - protein, 93 aa, Zika virus; identical to SEQ ID NO: 2051

SEQ ID NO: 2182 - protein, 77 aa, Zika virus; identical to SEQ ID NO: 2065

SEQ ID NO: 2183 - protein, 75 aa, Zika virus; identical to SEQ ID NO: 2049

SEQ ID NO: 2184 - protein, 168 aa, Zika virus; identical to SEQ ID NO: 4

SEQ ID NO: 2185 - protein, 93 aa, Zika virus; identical to SEQ ID NO: 2051

SEQ ID NO: 2186 - protein, 77 aa, Zika virus; identical to SEQ ID NO: 2065

SEQ ID NO: 2187 - protein, 75 aa, Zika virus; identical to SEQ ID NO: 2049

SEQ ID NO: 2188 - protein, 168 aa, Zika virus; identical to SEQ ID NO: 4

SEQ ID NO: 2189 - protein, 93 aa, Zika virus; identical to SEQ ID NO: 2051

SEQ ID NO: 2190 - protein, 77 aa, Zika virus; identical to SEQ ID NO: 2065

SEQ ID NO: 2191 - protein, 75 aa, Zika virus; identical to SEQ ID NO: 2049

SEQ ID NO: 2192 - protein, 168 aa, Zika virus; identical to SEQ ID NO: 4

SEQ ID NO: 2193 - protein, 93 aa, Zika virus; identical to SEQ ID NO: 2051

SEQ ID NO: 2194 - protein, 77 aa, Zika virus; identical to SEQ ID NO: 2065

SEQ ID NO: 2195 - protein, 75 aa, Zika virus; identical to SEQ ID NO: 2049

SEQ ID NO: 2196 - protein, 168 aa, Zika virus; identical to SEQ ID NO: 4

SEQ ID NO: 2197 - protein, 93 aa, Zika virus; identical to SEQ ID NO: 2051

SEQ ID NO: 2198 - protein, 77 aa, Zika virus; identical to SEQ ID NO: 2065

SEQ ID NO: 2199 - protein, 75 aa, Zika virus; identical to SEQ ID NO: 2049

SEQ ID NO: 2200 - protein, 168 aa, Zika virus; identical to SEQ ID NO: 4

SEQ ID NO: 2201 - protein, 93 aa, Zika virus; identical to SEQ ID NO: 2051

SEQ ID NO: 2202 - protein, 77 aa, Zika virus; identical to SEQ ID NO: 2065

SEQ ID NO: 2203 - protein, 75 aa, Zika virus; identical to SEQ ID NO: 2049

SEQ ID NO: 2204 - protein, 168 aa, Zika virus; identical to SEQ ID NO: 4

SEQ ID NO: 2205 - protein, 93 aa, Zika virus; identical to SEQ ID NO: 2051

SEQ ID NO: 2206 - protein, 77 aa, Zika virus; identical to SEQ ID NO: 2065

SEQ ID NO: 2207 - protein, 75 aa, Zika virus; identical to SEQ ID NO: 2049

SEQ ID NO: 2208 - protein, 77 aa, Zika virus; identical to SEQ ID NO: 2065

SEQ ID NO: 2209 - protein, 77 aa, Zika virus; identical to SEQ ID NO: 2065

SEQ ID NO: 2210 - protein, 77 aa, Zika virus; identical to SEQ ID NO: 2065

SEQ ID NO: 2211 - protein, 168 aa, Zika virus
AEVTRRGSAYYMYLDRNDAGEAISFPTTLGMNKCYIQIMDLGHMCDATMSYECPMLDEGVEPDDVDCWCNTTSTWVVYGTCHRKKGEARRSRRAVTLPSHSTRKLQTRSQTWLESREYTKHLIRVENWIFRNPGFALAAAAIAWLLGSSTSQKVIYLVMILLIAPAYS

SEQ ID NO: 2212 - protein, 93 aa, Zika virus
AEVTRRGSAYYMYLDRNDAGEAISFPTTLGMNKCYIQIMDLGHMCDATMSYECPMLDEGVEPDDVDCWCNTTSTWVVYGTCHRKKGEARRSRR

SEQ ID NO: 2213 - protein, 79 aa, Zika virus
RRGSAYYMYLDRNDAGEAISFPTTLGMNKCYIQIMDLGHMCDATMSYECPMLDEGVEPDDVDCWCNTTSTWVVYGTCHR

SEQ ID NO: 2214 - protein, 75 aa, Zika virus; identical to SEQ ID NO: 2049

SEQ ID NO: 2215 - protein, 168 aa, Zika virus; identical to SEQ ID NO: 4

SEQ ID NO: 2216 - protein, 93 aa, Zika virus; identical to SEQ ID NO: 2051

SEQ ID NO: 2217 - protein, 77 aa, Zika virus; identical to SEQ ID NO: 2065

SEQ ID NO: 2218 - protein, 75 aa, Zika virus; identical to SEQ ID NO: 2049

SEQ ID NO: 2219 - protein, 168 aa, Zika virus; identical to SEQ ID NO: 4

SEQ ID NO: 2220 - protein, 93 aa, Zika virus; identical to SEQ ID NO: 2051

SEQ ID NO: 2221 - protein, 77 aa, Zika virus; identical to SEQ ID NO: 2065

SEQ ID NO: 2222 - protein, 75 aa, Zika virus; identical to SEQ ID NO: 2049

SEQ ID NO: 2223 - protein, 168 aa, Zika virus
AEVTRRGSAYYMYLDRNDAGEAISFPTTLGMNKCYIQIMDLGHMCDATMSYECPMLDEGVEPDDVDCWCNTTSTWVVYGTCHHKKGEARRSRRAVTLPSHSTRKLQTRSQTWLESREYTKHLIRVENWIFRNPGFALAAAAIAWLLGSSTSQKVIYLVMILLIAPACS

SEQ ID NO: 2224 - protein, 93 aa, Zika virus; identical to SEQ ID NO: 2051

SEQ ID NO: 2225 - protein, 77 aa, Zika virus; identical to SEQ ID NO: 2065

SEQ ID NO: 2226 - protein, 75 aa, Zika virus
AVTLPSHSTRKLQTRSQTWLESREYTKHLIRVENWIFRNPGFALAAAAIAWLLGSSTSQKVIYLVMILLIAPACS

SEQ ID NO: 2227 - protein, 168 aa, Zika virus; identical to SEQ ID NO: 4

SEQ ID NO: 2228 - protein, 93 aa, Zika virus; identical to SEQ ID NO: 2051

SEQ ID NO: 2229 - protein, 77 aa, Zika virus; identical to SEQ ID NO: 2065

SEQ ID NO: 2230 - protein, 75 aa, Zika virus; identical to SEQ ID NO: 2049

SEQ ID NO: 2231 - protein, 168 aa, Zika virus; identical to SEQ ID NO: 4

SEQ ID NO: 2232 - protein, 93 aa, Zika virus; identical to SEQ ID NO: 2051

SEQ ID NO: 2233 - protein, 77 aa, Zika virus; identical to SEQ ID NO: 2065

SEQ ID NO: 2234 - protein, 75 aa, Zika virus; identical to SEQ ID NO: 2049

SEQ ID NO: 2235 - protein, 168 aa, Zika virus
AEVTRRGSAFYMYLDRNDAGEAISFPTTLGMNKCYIQIMDLGHMCDATMSYECPMLDEGVEPDDVDCWCNTTSTWVVYGTCHHKKGEARRSRRAVTLPSHSTRKLQTRSQTWLESREYTKHLIRVENWIFRNPGFALAAAAIAWLLGSSTSQKVIYLVMILLIAPAYS

SEQ ID NO: 2236 - protein, 93 aa, Zika virus
AEVTRRGSAFYMYLDRNDAGEAISFPTTLGMNKCYIQIMDLGHMCDATMSYECPMLDEGVEPDDVDCWCNTTSTWVVYGTCHHKKGEARRSRR

SEQ ID NO: 2237 - protein, 77 aa, Zika virus
RRGSAFYMYLDRNDAGEAISFPTTLGMNKCYIQIMDLGHMCDATMSYECPMLDEGVEPDDVDCWCNTTSTWVVYGTC

SEQ ID NO: 2238 - protein, 75 aa, Zika virus; identical to SEQ ID NO: 2049

SEQ ID NO: 2239 - protein, 168 aa, Zika virus
AQVTRRGSAYYMYLDRNDAGEAISFPTTLGMNKCYIQIMDLGHMCDATMSYECPMLDEGVEPDDVDCWCNTTSTWVVYGTCHHKKGEARRSRRAVTLPSHSTRKLQTRSQTWLESREYTKHLIRVENWIFRNPGFALAAAAIAWLLGSSTSQKVIYLVMILLIAPAYS

SEQ ID NO: 2240 - protein, 93 aa, Zika virus
AQVTRRGSAYYMYLDRNDAGEAISFPTTLGMNKCYIQIMDLGHMCDATMSYECPMLDEGVEPDDVDCWCNTTSTWVVYGTCHHKKGEARRSRR

SEQ ID NO: 2241 - protein, 77 aa, Zika virus; identical to SEQ ID NO: 2065

SEQ ID NO: 2242 - protein, 75 aa, Zika virus; identical to SEQ ID NO: 2049

SEQ ID NO: 2243 - protein, 168 aa, Zika virus; identical to SEQ ID NO: 4

SEQ ID NO: 2244 - protein, 93 aa, Zika virus; identical to SEQ ID NO: 2051

SEQ ID NO: 2245 - protein, 77 aa, Zika virus; identical to SEQ ID NO: 2065

SEQ ID NO: 2246 - protein, 75 aa, Zika virus; identical to SEQ ID NO: 2049

SEQ ID NO: 2247 - protein, 168 aa, Zika virus
AEVTRRGSAYYMYLDRNDAGEAISFPTTLGMNKCYIQIMDLGHMCDATMSYECPMLEEGVEPYDVDCWCNTTSTWVVYGTCHHKKGEARRSRRAVTLPSHSTRKLQTRPQTWLESREYTKHLIRVENWIFRNPGFALAAAAIAWLLGSSTSQKVIYLVMILLIAPAYS

SEQ ID NO: 2248 - protein, 93 aa, Zika virus
AEVTRRGSAYYMYLDRNDAGEAISFPTTLGMNKCYIQIMDLGHMCDATMSYECPMLEEGVEPYDVDCWCNTTSTWVVYGTCHHKKGEARRSRR

SEQ ID NO: 2249 - protein, 77 aa, Zika virus
RRGSAYYMYLDRNDAGEAISFPTTLGMNKCYIQIMDLGHMCDATMSYECPMLEEGVEPYDVDCWCNTTSTWVVYGTC

SEQ ID NO: 2250 - protein, 75 aa, Zika virus
AVTLPSHSTRKLQTRPQTWLESREYTKHLIRVENWIFRNPGFALAAAAIAWLLGSSTSQKVIYLVMILLIAPAYS

SEQ ID NO: 2251 - protein, 168 aa, Zika virus; identical to SEQ ID NO: 4

SEQ ID NO: 2252 - protein, 93 aa, Zika virus; identical to SEQ ID NO: 2051

SEQ ID NO: 2253 - protein, 77 aa, Zika virus; identical to SEQ ID NO: 2065

SEQ ID NO: 2254 - protein, 75 aa, Zika virus; identical to SEQ ID NO: 2049

SEQ ID NO: 2255 - protein, 168 aa, Zika virus; identical to SEQ ID NO: 4

SEQ ID NO: 2256 - protein, 93 aa, Zika virus; identical to SEQ ID NO: 2051

SEQ ID NO: 2257 - protein, 77 aa, Zika virus; identical to SEQ ID NO: 2065

SEQ ID NO: 2258 - protein, 75 aa, Zika virus; identical to SEQ ID NO: 2049

SEQ ID NO: 2259 - protein, 77 aa, Zika virus; identical to SEQ ID NO: 2061

SEQ ID NO: 2260 - protein, 88 aa, Zika virus; identical to SEQ ID NO: 2047

SEQ ID NO: 2261 - protein, 88 aa, Zika virus; identical to SEQ ID NO: 2047

SEQ ID NO: 2262 - protein, 74 aa, Zika virus; identical to SEQ ID NO: 2048

SEQ ID NO: 2263 - protein, 88 aa, Zika virus; identical to SEQ ID NO: 2047

SEQ ID NO: 2264 - protein, 74 aa, Zika virus; identical to SEQ ID NO: 2048

SEQ ID NO: 2265 - protein, 88 aa, Zika virus; identical to SEQ ID NO: 2047

SEQ ID NO: 2266 - protein, 74 aa, Zika virus; identical to SEQ ID NO: 2048

SEQ ID NO: 2267 - protein, 88 aa, Zika virus; identical to SEQ ID NO: 2047

SEQ ID NO: 2268 - protein, 74 aa, Zika virus; identical to SEQ ID NO: 2048

SEQ ID NO: 2269 - protein, 88 aa, Zika virus; identical to SEQ ID NO: 2047

SEQ ID NO: 2270 - protein, 74 aa, Zika virus; identical to SEQ ID NO: 2048

SEQ ID NO: 2271 - protein, 88 aa, Zika virus; identical to SEQ ID NO: 2047

SEQ ID NO: 2272 - protein, 74 aa, Zika virus; identical to SEQ ID NO: 2048

SEQ ID NO: 2273 - protein, 88 aa, Zika virus; identical to SEQ ID NO: 2047

SEQ ID NO: 2274 - protein, 74 aa, Zika virus; identical to SEQ ID NO: 2048

SEQ ID NO: 2275 - protein, 88 aa, Zika virus; identical to SEQ ID NO: 2047

SEQ ID NO: 2276 - protein, 74 aa, Zika virus; identical to SEQ ID NO: 2048

SEQ ID NO: 2277 - protein, 88 aa, Zika virus; identical to SEQ ID NO: 2047

SEQ ID NO: 2278 - protein, 74 aa, Zika virus; identical to SEQ ID NO: 2048

SEQ ID NO: 2279 - protein, 88 aa, Zika virus; identical to SEQ ID NO: 2047

SEQ ID NO: 2280 - protein, 74 aa, Zika virus; identical to SEQ ID NO: 2048

SEQ ID NO: 2281 - protein, 88 aa, Zika virus; identical to SEQ ID NO: 2047

SEQ ID NO: 2282 - protein, 74 aa, Zika virus; identical to SEQ ID NO: 2048

SEQ ID NO: 2283 - protein, 88 aa, Zika virus; identical to SEQ ID NO: 2047

SEQ ID NO: 2284 - protein, 74 aa, Zika virus; identical to SEQ ID NO: 2048

SEQ ID NO: 2285 - protein, 88 aa, Zika virus; identical to SEQ ID NO: 2047

SEQ ID NO: 2286 - protein, 74 aa, Zika virus; identical to SEQ ID NO: 2048

SEQ ID NO: 2287 - protein, 88 aa, Zika virus; identical to SEQ ID NO: 2047

SEQ ID NO: 2288 - protein, 74 aa, Zika virus; identical to SEQ ID NO: 2048

SEQ ID NO: 2289 - protein, 88 aa, Zika virus; identical to SEQ ID NO: 2047

SEQ ID NO: 2290 - protein, 74 aa, Zika virus; identical to SEQ ID NO: 2048

SEQ ID NO: 2291 - protein, 88 aa, Zika virus; identical to SEQ ID NO: 2047

SEQ ID NO: 2292 - protein, 74 aa, Zika virus
VTLPSHSTRKLQTRSQTWLESREYTRHLIRVENWIFRNPGFALAAAAIAWLLGSSTSQKVIYLVMILLIAPAYS

SEQ ID NO: 2293 - protein, 88 aa, Zika virus; identical to SEQ ID NO: 2047

SEQ ID NO: 2294 - protein, 74 aa, Zika virus; identical to SEQ ID NO: 2292

SEQ ID NO: 2295 - protein, 88 aa, Zika virus; identical to SEQ ID NO: 2047

SEQ ID NO: 2296 - protein, 74 aa, Zika virus; identical to SEQ ID NO: 2292

SEQ ID NO: 2297 - protein, 88 aa, Zika virus; identical to SEQ ID NO: 2047

SEQ ID NO: 2298 - protein, 74 aa, Zika virus; identical to SEQ ID NO: 2292

SEQ ID NO: 2299 - protein, 88 aa, Zika virus; identical to SEQ ID NO: 2047

SEQ ID NO: 2300 - protein, 74 aa, Zika virus; identical to SEQ ID NO: 2292

SEQ ID NO: 2301 - protein, 88 aa, Zika virus; identical to SEQ ID NO: 2047

SEQ ID NO: 2302 - protein, 74 aa, Zika virus; identical to SEQ ID NO: 2292

SEQ ID NO: 2303 - protein, 88 aa, Zika virus
RRGSAYYMYLDRSDAGKAISFATTLGVNKCHVQIMDLGHMCDATMSYECPMLDEGVEPDDVDCWCNTTSTWVVYGTCHHKKGEARRSR

SEQ ID NO: 2304 - protein, 74 aa, Zika virus; identical to SEQ ID NO: 2057

SEQ ID NO: 2305 - protein, 77 aa, Zika virus; identical to SEQ ID NO: 2065

SEQ ID NO: 2306 - protein, 88 aa, Zika virus; identical to SEQ ID NO: 2047

SEQ ID NO: 2307 - protein, 74 aa, Zika virus; identical to SEQ ID NO: 2048

SEQ ID NO: 2308 - protein, 88 aa, Zika virus
RRGSAYYMYLDRSDAGEAISFPTTLGMNKCYIQIMDLGHMCDATMSYECPMLDEGVEPDDVDCWCNTTSTWVVYGTCHHKKGEARRSR

SEQ ID NO: 2309 - protein, 74 aa, Zika virus; identical to SEQ ID NO: 2048

SEQ ID NO: 2310 - protein, 88 aa, Zika virus; identical to SEQ ID NO: 2308

SEQ ID NO: 2311 - protein, 74 aa, Zika virus; identical to SEQ ID NO: 2048

SEQ ID NO: 2312 - protein, 93 aa, Zika virus; identical to SEQ ID NO: 2051

SEQ ID NO: 2313 - protein, 88 aa, Zika virus; identical to SEQ ID NO: 2047

SEQ ID NO: 2314 - protein, 75 aa, Zika virus; identical to SEQ ID NO: 2049

SEQ ID NO: 2315 - protein, 74 aa, Zika virus; identical to SEQ ID NO: 2048

SEQ ID NO: 2316 - protein, 93 aa, Zika virus; identical to SEQ ID NO: 2051

SEQ ID NO: 2317 - protein, 88 aa, Zika virus; identical to SEQ ID NO: 2047

SEQ ID NO: 2318 - protein, 75 aa, Zika virus; identical to SEQ ID NO: 2049

SEQ ID NO: 2319 - protein, 74 aa, Zika virus; identical to SEQ ID NO: 2048

SEQ ID NO: 2320 - protein, 93 aa, Zika virus; identical to SEQ ID NO: 2051

SEQ ID NO: 2321 - protein, 88 aa, Zika virus; identical to SEQ ID NO: 2047

SEQ ID NO: 2322 - protein, 75 aa, Zika virus; identical to SEQ ID NO: 2049

SEQ ID NO: 2323 - protein, 74 aa, Zika virus; identical to SEQ ID NO: 2048

SEQ ID NO: 2324 - protein, 88 aa, Zika virus; identical to SEQ ID NO: 2303

SEQ ID NO: 2325 - protein, 74 aa, Zika virus; identical to SEQ ID NO: 2057

SEQ ID NO: 2326 - protein, 88 aa, Zika virus; identical to SEQ ID NO: 2047

SEQ ID NO: 2327 - protein, 74 aa, Zika virus; identical to SEQ ID NO: 2048

SEQ ID NO: 2328 - protein, 77 aa, Zika virus; identical to SEQ ID NO: 2065

SEQ ID NO: 2329 - protein, 88 aa, Zika virus; identical to SEQ ID NO: 2047

SEQ ID NO: 2330 - protein, 74 aa, Zika virus; identical to SEQ ID NO: 2048

SEQ ID NO: 2331 - protein, 88 aa, Zika virus; identical to SEQ ID NO: 2047

SEQ ID NO: 2332 - protein, 74 aa, Zika virus; identical to SEQ ID NO: 2048

SEQ ID NO: 2333 - protein, 77 aa, Zika virus; identical to SEQ ID NO: 2084

SEQ ID NO: 2334 - protein, 88 aa, Zika virus; identical to SEQ ID NO: 2308

SEQ ID NO: 2335 - protein, 74 aa, Zika virus; identical to SEQ ID NO: 2048

SEQ ID NO: 2336 - protein, 88 aa, Zika virus; identical to SEQ ID NO: 2308

SEQ ID NO: 2337 - protein, 74 aa, Zika virus; identical to SEQ ID NO: 2048

SEQ ID NO: 2338 - protein, 88 aa, Zika virus; identical to SEQ ID NO: 2308

SEQ ID NO: 2339 - protein, 74 aa, Zika virus; identical to SEQ ID NO: 2048

SEQ ID NO: 2340 - protein, 88 aa, Zika virus; identical to SEQ ID NO: 2308

SEQ ID NO: 2341 - protein, 74 aa, Zika virus; identical to SEQ ID NO: 2048

SEQ ID NO: 2342 - protein, 88 aa, Zika virus; identical to SEQ ID NO: 2308

SEQ ID NO: 2343 - protein, 74 aa, Zika virus; identical to SEQ ID NO: 2048

SEQ ID NO: 2344 - protein, 88 aa, Zika virus; identical to SEQ ID NO: 2047

SEQ ID NO: 2345 - protein, 74 aa, Zika virus; identical to SEQ ID NO: 2048

SEQ ID NO: 2346 - protein, 88 aa, Zika virus; identical to SEQ ID NO: 2047

SEQ ID NO: 2347 - protein, 74 aa, Zika virus; identical to SEQ ID NO: 2048

SEQ ID NO: 2348 - protein, 88 aa, Zika virus; identical to SEQ ID NO: 2047

SEQ ID NO: 2349 - protein, 74 aa, Zika virus; identical to SEQ ID NO: 2048

SEQ ID NO: 2350 - protein, 77 aa, Zika virus; identical to SEQ ID NO: 2061

SEQ ID NO: 2351 - protein, 88 aa, Zika virus; identical to SEQ ID NO: 2303

SEQ ID NO: 2352 - protein, 74 aa, Zika virus; identical to SEQ ID NO: 2057

SEQ ID NO: 2353 - protein, 77 aa, Zika virus
RRGNAYYMYLDRSDAGEAISFPTTMGMNKCYIQIMDLGHMCDATMSYECPMLDEGVEPDDVDCWCNTTSTWVVYGTC

SEQ ID NO: 2354 - protein, 88 aa, Zika virus; identical to SEQ ID NO: 2047

SEQ ID NO: 2355 - protein, 74 aa, Zika virus; identical to SEQ ID NO: 2048

SEQ ID NO: 2356 - protein, 93 aa, Zika virus; identical to SEQ ID NO: 2051

SEQ ID NO: 2357 - protein, 88 aa, Zika virus; identical to SEQ ID NO: 2047

SEQ ID NO: 2358 - protein, 75 aa, Zika virus; identical to SEQ ID NO: 2049

SEQ ID NO: 2359 - protein, 74 aa, Zika virus; identical to SEQ ID NO: 2048

SEQ ID NO: 2360 - protein, 93 aa, Zika virus; identical to SEQ ID NO: 2051

SEQ ID NO: 2361 - protein, 88 aa, Zika virus; identical to SEQ ID NO: 2047

SEQ ID NO: 2362 - protein, 75 aa, Zika virus; identical to SEQ ID NO: 2049

SEQ ID NO: 2363 - protein, 74 aa, Zika virus; identical to SEQ ID NO: 2048

SEQ ID NO: 2364 - protein, 93 aa, Zika virus; identical to SEQ ID NO: 2051

SEQ ID NO: 2365 - protein, 88 aa, Zika virus; identical to SEQ ID NO: 2047

SEQ ID NO: 2366 - protein, 75 aa, Zika virus; identical to SEQ ID NO: 2049

SEQ ID NO: 2367 - protein, 74 aa, Zika virus; identical to SEQ ID NO: 2048

SEQ ID NO: 2368 - protein, 93 aa, Zika virus; identical to SEQ ID NO: 2060

SEQ ID NO: 2369 - protein, 88 aa, Zika virus; identical to SEQ ID NO: 2303

SEQ ID NO: 2370 - protein, 75 aa, Zika virus; identical to SEQ ID NO: 2058

SEQ ID NO: 2371 - protein, 74 aa, Zika virus; identical to SEQ ID NO: 2057

SEQ ID NO: 2372 - protein, 93 aa, Zika virus; identical to SEQ ID NO: 2060

SEQ ID NO: 2373 - protein, 88 aa, Zika virus; identical to SEQ ID NO: 2303

SEQ ID NO: 2374 - protein, 75 aa, Zika virus; identical to SEQ ID NO: 2058

SEQ ID NO: 2375 - protein, 74 aa, Zika virus; identical to SEQ ID NO: 2057

SEQ ID NO: 2376 - protein, 93 aa, Zika virus; identical to SEQ ID NO: 2060

SEQ ID NO: 2377 - protein, 88 aa, Zika virus; identical to SEQ ID NO: 2303

SEQ ID NO: 2378 - protein, 75 aa, Zika virus; identical to SEQ ID NO: 2058

SEQ ID NO: 2379 - protein, 74 aa, Zika virus; identical to SEQ ID NO: 2057

SEQ ID NO: 2380 - protein, 93 aa, Zika virus
AEITRRGSAYYMYLDRSDAGKAISFATTLGVNKCHVQIMDLGHMCDATMSYECPMLNEGVEPDDVDCWCNTTSTWVVYGTCHHKKGEARRSRR

SEQ ID NO: 2381 - protein, 88 aa, Zika virus
RRGSAYYMYLDRSDAGKAISFATTLGVNKCHVQIMDLGHMCDATMSYECPMLNEGVEPDDVDCWCNTTSTWVVYGTCHHKKGEARRSR

SEQ ID NO: 2382 - protein, 75 aa, Zika virus; identical to SEQ ID NO: 2058

SEQ ID NO: 2383 - protein, 74 aa, Zika virus; identical to SEQ ID NO: 2057

SEQ ID NO: 2384 - protein, 93 aa, Zika virus; identical to SEQ ID NO: 2060

SEQ ID NO: 2385 - protein, 88 aa, Zika virus; identical to SEQ ID NO: 2303

SEQ ID NO: 2386 - protein, 75 aa, Zika virus; identical to SEQ ID NO: 2058

SEQ ID NO: 2387 - protein, 74 aa, Zika virus; identical to SEQ ID NO: 2057

SEQ ID NO: 2388 - protein, 93 aa, Zika virus; identical to SEQ ID NO: 2060

SEQ ID NO: 2389 - protein, 88 aa, Zika virus; identical to SEQ ID NO: 2303

SEQ ID NO: 2390 - protein, 75 aa, Zika virus; identical to SEQ ID NO: 2058

SEQ ID NO: 2391 - protein, 74 aa, Zika virus; identical to SEQ ID NO: 2057

SEQ ID NO: 2392 - protein, 93 aa, Zika virus; identical to SEQ ID NO: 2060

SEQ ID NO: 2393 - protein, 88 aa, Zika virus; identical to SEQ ID NO: 2303

SEQ ID NO: 2394 - protein, 75 aa, Zika virus; identical to SEQ ID NO: 2058

SEQ ID NO: 2395 - protein, 74 aa, Zika virus; identical to SEQ ID NO: 2057

SEQ ID NO: 2396 - protein, 93 aa, Zika virus; identical to SEQ ID NO: 2060

SEQ ID NO: 2397 - protein, 88 aa, Zika virus; identical to SEQ ID NO: 2303

SEQ ID NO: 2398 - protein, 75 aa, Zika virus; identical to SEQ ID NO: 2058

SEQ ID NO: 2399 - protein, 74 aa, Zika virus; identical to SEQ ID NO: 2057

SEQ ID NO: 2400 - protein, 93 aa, Zika virus; identical to SEQ ID NO: 2380

SEQ ID NO: 2401 - protein, 88 aa, Zika virus; identical to SEQ ID NO: 2381

SEQ ID NO: 2402 - protein, 75 aa, Zika virus; identical to SEQ ID NO: 2058

SEQ ID NO: 2403 - protein, 74 aa, Zika virus; identical to SEQ ID NO: 2057

SEQ ID NO: 2404 - protein, 93 aa, Zika virus; identical to SEQ ID NO: 2060

SEQ ID NO: 2405 - protein, 88 aa, Zika virus; identical to SEQ ID NO: 2303

SEQ ID NO: 2406 - protein, 75 aa, Zika virus; identical to SEQ ID NO: 2058

SEQ ID NO: 2407 - protein, 74 aa, Zika virus; identical to SEQ ID NO: 2057

SEQ ID NO: 2408 - protein, 93 aa, Zika virus; identical to SEQ ID NO: 2380

SEQ ID NO: 2409 - protein, 88 aa, Zika virus; identical to SEQ ID NO: 2381

SEQ ID NO: 2410 - protein, 75 aa, Zika virus; identical to SEQ ID NO: 2058

SEQ ID NO: 2411 - protein, 74 aa, Zika virus; identical to SEQ ID NO: 2057

SEQ ID NO: 2412 - protein, 93 aa, Zika virus; identical to SEQ ID NO: 2380

SEQ ID NO: 2413 - protein, 88 aa, Zika virus; identical to SEQ ID NO: 2381

SEQ ID NO: 2414 - protein, 75 aa, Zika virus; identical to SEQ ID NO: 2058

SEQ ID NO: 2415 - protein, 74 aa, Zika virus; identical to SEQ ID NO: 2057

SEQ ID NO: 2416 - protein, 93 aa, Zika virus; identical to SEQ ID NO: 2060

SEQ ID NO: 2417 - protein, 88 aa, Zika virus; identical to SEQ ID NO: 2303

SEQ ID NO: 2418 - protein, 75 aa, Zika virus; identical to SEQ ID NO: 2058

SEQ ID NO: 2419 - protein, 74 aa, Zika virus; identical to SEQ ID NO: 2057

SEQ ID NO: 2420 - protein, 93 aa, Zika virus; identical to SEQ ID NO: 2060

SEQ ID NO: 2421 - protein, 88 aa, Zika virus; identical to SEQ ID NO: 2303

SEQ ID NO: 2422 - protein, 75 aa, Zika virus; identical to SEQ ID NO: 2058

SEQ ID NO: 2423 - protein, 74 aa, Zika virus; identical to SEQ ID NO: 2057

SEQ ID NO: 2424 - protein, 93 aa, Zika virus; identical to SEQ ID NO: 2060

SEQ ID NO: 2425 - protein, 88 aa, Zika virus; identical to SEQ ID NO: 2303

SEQ ID NO: 2426 - protein, 75 aa, Zika virus; identical to SEQ ID NO: 2058

SEQ ID NO: 2427 - protein, 74 aa, Zika virus; identical to SEQ ID NO: 2057

SEQ ID NO: 2428 - protein, 93 aa, Zika virus; identical to SEQ ID NO: 2060

SEQ ID NO: 2429 - protein, 88 aa, Zika virus; identical to SEQ ID NO: 2303

SEQ ID NO: 2430 - protein, 75 aa, Zika virus; identical to SEQ ID NO: 2058

SEQ ID NO: 2431 - protein, 74 aa, Zika virus; identical to SEQ ID NO: 2057

SEQ ID NO: 2432 - protein, 88 aa, Zika virus
RRGNAYYMYLDRSDAGEAISFPTTLGMNKCYIQIMDLGHMCDATMSYECPMLDEGVEPDDVDCWCNTTSTWVVYGTCHHKKGEARRSR

SEQ ID NO: 2433 - protein, 74 aa, Zika virus; identical to SEQ ID NO: 2048

SEQ ID NO: 2434 - protein, 93 aa, Zika virus; identical to SEQ ID NO: 2060

SEQ ID NO: 2435 - protein, 88 aa, Zika virus; identical to SEQ ID NO: 2303

SEQ ID NO: 2436 - protein, 75 aa, Zika virus; identical to SEQ ID NO: 2058

SEQ ID NO: 2437 - protein, 74 aa, Zika virus; identical to SEQ ID NO: 2057

SEQ ID NO: 2438 - protein, 93 aa, Zika virus; identical to SEQ ID NO: 2380

SEQ ID NO: 2439 - protein, 88 aa, Zika virus; identical to SEQ ID NO: 2381

SEQ ID NO: 2440 - protein, 75 aa, Zika virus; identical to SEQ ID NO: 2058

SEQ ID NO: 2441 - protein, 74 aa, Zika virus; identical to SEQ ID NO: 2057

SEQ ID NO: 2442 - protein, 93 aa, Zika virus; identical to SEQ ID NO: 2060

SEQ ID NO: 2443 - protein, 88 aa, Zika virus; identical to SEQ ID NO: 2303

SEQ ID NO: 2444 - protein, 75 aa, Zika virus; identical to SEQ ID NO: 2058

SEQ ID NO: 2445 - protein, 74 aa, Zika virus; identical to SEQ ID NO: 2057

SEQ ID NO: 2446 - protein, 93 aa, Zika virus; identical to SEQ ID NO: 2060

SEQ ID NO: 2447 - protein, 88 aa, Zika virus; identical to SEQ ID NO: 2303

SEQ ID NO: 2448 - protein, 75 aa, Zika virus
AVTLPSHSTRKLQTRPQTWLESREYTKHLIKVENWIFRNPGFALVAVAIAWLLGSSTSQKVIYLVMILLIAPAYS

SEQ ID NO: 2449 - protein, 74 aa, Zika virus
VTLPSHSTRKLQTRPQTWLESREYTKHLIKVENWIFRNPGFALVAVAIAWLLGSSTSQKVIYLVMILLIAPAYS

SEQ ID NO: 2450 - protein, 93 aa, Zika virus; identical to SEQ ID NO: 2060

SEQ ID NO: 2451 - protein, 88 aa, Zika virus; identical to SEQ ID NO: 2303

SEQ ID NO: 2452 - protein, 75 aa, Zika virus; identical to SEQ ID NO: 2058

SEQ ID NO: 2453 - protein, 74 aa, Zika virus; identical to SEQ ID NO: 2057

SEQ ID NO: 2454 - protein, 93 aa, Zika virus; identical to SEQ ID NO: 2060

SEQ ID NO: 2455 - protein, 88 aa, Zika virus; identical to SEQ ID NO: 2303

SEQ ID NO: 2456 - protein, 75 aa, Zika virus; identical to SEQ ID NO: 2058

SEQ ID NO: 2457 - protein, 74 aa, Zika virus; identical to SEQ ID NO: 2057

SEQ ID NO: 2458 - protein, 93 aa, Zika virus; identical to SEQ ID NO: 2060

SEQ ID NO: 2459 - protein, 88 aa, Zika virus; identical to SEQ ID NO: 2303

SEQ ID NO: 2460 - protein, 75 aa, Zika virus; identical to SEQ ID NO: 2058

SEQ ID NO: 2461 - protein, 74 aa, Zika virus; identical to SEQ ID NO: 2057

SEQ ID NO: 2462 - protein, 93 aa, Zika virus; identical to SEQ ID NO: 2380

SEQ ID NO: 2463 - protein, 88 aa, Zika virus; identical to SEQ ID NO: 2381

SEQ ID NO: 2464 - protein, 75 aa, Zika virus
AVTLPSHSTRKLQTRSQTWLESREYTKHLIKVENWIFRNPGFALVAVAIAWLLGSSTSQKVICLVMILLIAPAYS

SEQ ID NO: 2465 - protein, 74 aa, Zika virus
VTLPSHSTRKLQTRSQTWLESREYTKHLIKVENWIFRNPGFALVAVAIAWLLGSSTSQKVICLVMILLIAPAYS

SEQ ID NO: 2466 - protein, 93 aa, Zika virus; identical to SEQ ID NO: 2060

SEQ ID NO: 2467 - protein, 88 aa, Zika virus; identical to SEQ ID NO: 2303

SEQ ID NO: 2468 - protein, 75 aa, Zika virus; identical to SEQ ID NO: 2058

SEQ ID NO: 2469 - protein, 74 aa, Zika virus; identical to SEQ ID NO: 2057

SEQ ID NO: 2470 - protein, 93 aa, Zika virus; identical to SEQ ID NO: 2060

SEQ ID NO: 2471 - protein, 88 aa, Zika virus; identical to SEQ ID NO: 2303

SEQ ID NO: 2472 - protein, 75 aa, Zika virus; identical to SEQ ID NO: 2058

SEQ ID NO: 2473 - protein, 74 aa, Zika virus; identical to SEQ ID NO: 2057

SEQ ID NO: 2474 - protein, 93 aa, Zika virus; identical to SEQ ID NO: 2380

SEQ ID NO: 2475 - protein, 88 aa, Zika virus; identical to SEQ ID NO: 2381

SEQ ID NO: 2476 - protein, 75 aa, Zika virus; identical to SEQ ID NO: 2058

SEQ ID NO: 2477 - protein, 74 aa, Zika virus; identical to SEQ ID NO: 2057

SEQ ID NO: 2478 - protein, 93 aa, Zika virus; identical to SEQ ID NO: 2060

SEQ ID NO: 2479 - protein, 88 aa, Zika virus; identical to SEQ ID NO: 2303

SEQ ID NO: 2480 - protein, 75 aa, Zika virus; identical to SEQ ID NO: 2448

SEQ ID NO: 2481 - protein, 74 aa, Zika virus; identical to SEQ ID NO: 2449

SEQ ID NO: 2482 - protein, 93 aa, Zika virus; identical to SEQ ID NO: 2060

SEQ ID NO: 2483 - protein, 88 aa, Zika virus; identical to SEQ ID NO: 2303

SEQ ID NO: 2484 - protein, 75 aa, Zika virus; identical to SEQ ID NO: 2448

SEQ ID NO: 2485 - protein, 74 aa, Zika virus; identical to SEQ ID NO: 2449

SEQ ID NO: 2486 - protein, 93 aa, Zika virus; identical to SEQ ID NO: 2060

SEQ ID NO: 2487 - protein, 88 aa, Zika virus; identical to SEQ ID NO: 2303

SEQ ID NO: 2488 - protein, 75 aa, Zika virus; identical to SEQ ID NO: 2058

SEQ ID NO: 2489 - protein, 74 aa, Zika virus; identical to SEQ ID NO: 2057

SEQ ID NO: 2490 - protein, 93 aa, Zika virus; identical to SEQ ID NO: 2060

SEQ ID NO: 2491 - protein, 88 aa, Zika virus; identical to SEQ ID NO: 2303

SEQ ID NO: 2492 - protein, 75 aa, Zika virus; identical to SEQ ID NO: 2058

SEQ ID NO: 2493 - protein, 74 aa, Zika virus; identical to SEQ ID NO: 2057

SEQ ID NO: 2494 - protein, 93 aa, Zika virus; identical to SEQ ID NO: 2060

SEQ ID NO: 2495 - protein, 88 aa, Zika virus; identical to SEQ ID NO: 2303

SEQ ID NO: 2496 - protein, 75 aa, Zika virus; identical to SEQ ID NO: 2058

SEQ ID NO: 2497 - protein, 74 aa, Zika virus; identical to SEQ ID NO: 2057

SEQ ID NO: 2498 - protein, 93 aa, Zika virus; identical to SEQ ID NO: 2060

SEQ ID NO: 2499 - protein, 88 aa, Zika virus; identical to SEQ ID NO: 2303

SEQ ID NO: 2500 - protein, 75 aa, Zika virus; identical to SEQ ID NO: 2058

SEQ ID NO: 2501 - protein, 74 aa, Zika virus; identical to SEQ ID NO: 2057

SEQ ID NO: 2502 - protein, 93 aa, Zika virus; identical to SEQ ID NO: 2060

SEQ ID NO: 2503 - protein, 88 aa, Zika virus; identical to SEQ ID NO: 2303

SEQ ID NO: 2504 - protein, 75 aa, Zika virus
AVTLPSHSTRKLQTRSQTWLESREYTKHLIKVENWIFRNPGFALVAVAIAWFLGSSTSQKVIYLVMILLIAPAYS

SEQ ID NO: 2505 - protein, 74 aa, Zika virus
VTLPSHSTRKLQTRSQTWLESREYTKHLIKVENWIFRNPGFALVAVAIAWFLGSSTSQKVIYLVMILLIAPAYS

SEQ ID NO: 2506 - protein, 93 aa, Zika virus; identical to SEQ ID NO: 2060

SEQ ID NO: 2507 - protein, 88 aa, Zika virus; identical to SEQ ID NO: 2303

SEQ ID NO: 2508 - protein, 75 aa, Zika virus; identical to SEQ ID NO: 2058

SEQ ID NO: 2509 - protein, 74 aa, Zika virus; identical to SEQ ID NO: 2057

SEQ ID NO: 2510 - protein, 93 aa, Zika virus; identical to SEQ ID NO: 2060

SEQ ID NO: 2511 - protein, 88 aa, Zika virus; identical to SEQ ID NO: 2303

SEQ ID NO: 2512 - protein, 75 aa, Zika virus; identical to SEQ ID NO: 2058

SEQ ID NO: 2513 - protein, 74 aa, Zika virus; identical to SEQ ID NO: 2057

SEQ ID NO: 2514 - protein, 93 aa, Zika virus; identical to SEQ ID NO: 2060

SEQ ID NO: 2515 - protein, 88 aa, Zika virus; identical to SEQ ID NO: 2303

SEQ ID NO: 2516 - protein, 75 aa, Zika virus; identical to SEQ ID NO: 2058

SEQ ID NO: 2517 - protein, 74 aa, Zika virus; identical to SEQ ID NO: 2057

SEQ ID NO: 2518 - protein, 93 aa, Zika virus; identical to SEQ ID NO: 2060

SEQ ID NO: 2519 - protein, 88 aa, Zika virus; identical to SEQ ID NO: 2303

SEQ ID NO: 2520 - protein, 75 aa, Zika virus; identical to SEQ ID NO: 2448

SEQ ID NO: 2521 - protein, 74 aa, Zika virus; identical to SEQ ID NO: 2449

SEQ ID NO: 2522 - protein, 93 aa, Zika virus; identical to SEQ ID NO: 2060

SEQ ID NO: 2523 - protein, 88 aa, Zika virus; identical to SEQ ID NO: 2303

SEQ ID NO: 2524 - protein, 75 aa, Zika virus; identical to SEQ ID NO: 2058

SEQ ID NO: 2525 - protein, 74 aa, Zika virus; identical to SEQ ID NO: 2057

SEQ ID NO: 2526 - protein, 93 aa, Zika virus; identical to SEQ ID NO: 2060

SEQ ID NO: 2527 - protein, 88 aa, Zika virus; identical to SEQ ID NO: 2303

SEQ ID NO: 2528 - protein, 75 aa, Zika virus; identical to SEQ ID NO: 2058

SEQ ID NO: 2529 - protein, 74 aa, Zika virus; identical to SEQ ID NO: 2057

SEQ ID NO: 2530 - protein, 93 aa, Zika virus; identical to SEQ ID NO: 2060

SEQ ID NO: 2531 - protein, 88 aa, Zika virus; identical to SEQ ID NO: 2303

SEQ ID NO: 2532 - protein, 75 aa, Zika virus; identical to SEQ ID NO: 2058

SEQ ID NO: 2533 - protein, 74 aa, Zika virus; identical to SEQ ID NO: 2057

SEQ ID NO: 2534 - protein, 93 aa, Zika virus; identical to SEQ ID NO: 2380

SEQ ID NO: 2535 - protein, 88 aa, Zika virus; identical to SEQ ID NO: 2381

SEQ ID NO: 2536 - protein, 75 aa, Zika virus; identical to SEQ ID NO: 2058

SEQ ID NO: 2537 - protein, 74 aa, Zika virus; identical to SEQ ID NO: 2057

SEQ ID NO: 2538 - protein, 93 aa, Zika virus; identical to SEQ ID NO: 2380

SEQ ID NO: 2539 - protein, 88 aa, Zika virus; identical to SEQ ID NO: 2381

SEQ ID NO: 2540 - protein, 75 aa, Zika virus; identical to SEQ ID NO: 2058

SEQ ID NO: 2541 - protein, 74 aa, Zika virus; identical to SEQ ID NO: 2057

SEQ ID NO: 2542 - protein, 93 aa, Zika virus; identical to SEQ ID NO: 2060

SEQ ID NO: 2543 - protein, 88 aa, Zika virus; identical to SEQ ID NO: 2303

SEQ ID NO: 2544 - protein, 75 aa, Zika virus; identical to SEQ ID NO: 2058

SEQ ID NO: 2545 - protein, 74 aa, Zika virus; identical to SEQ ID NO: 2057

SEQ ID NO: 2546 - protein, 93 aa, Zika virus; identical to SEQ ID NO: 2060

SEQ ID NO: 2547 - protein, 88 aa, Zika virus; identical to SEQ ID NO: 2303

SEQ ID NO: 2548 - protein, 75 aa, Zika virus; identical to SEQ ID NO: 2058

SEQ ID NO: 2549 - protein, 74 aa, Zika virus; identical to SEQ ID NO: 2057

SEQ ID NO: 2550 - protein, 93 aa, Zika virus; identical to SEQ ID NO: 2380

SEQ ID NO: 2551 - protein, 88 aa, Zika virus; identical to SEQ ID NO: 2381

SEQ ID NO: 2552 - protein, 75 aa, Zika virus; identical to SEQ ID NO: 2058

SEQ ID NO: 2553 - protein, 74 aa, Zika virus; identical to SEQ ID NO: 2057

SEQ ID NO: 2554 - protein, 93 aa, Zika virus; identical to SEQ ID NO: 2060

SEQ ID NO: 2555 - protein, 88 aa, Zika virus; identical to SEQ ID NO: 2303

SEQ ID NO: 2556 - protein, 75 aa, Zika virus; identical to SEQ ID NO: 2058

SEQ ID NO: 2557 - protein, 74 aa, Zika virus; identical to SEQ ID NO: 2057

SEQ ID NO: 2558 - protein, 93 aa, Zika virus; identical to SEQ ID NO: 2060

SEQ ID NO: 2559 - protein, 88 aa, Zika virus; identical to SEQ ID NO: 2303

SEQ ID NO: 2560 - protein, 75 aa, Zika virus; identical to SEQ ID NO: 2058

SEQ ID NO: 2561 - protein, 74 aa, Zika virus; identical to SEQ ID NO: 2057

SEQ ID NO: 2562 - protein, 93 aa, Zika virus; identical to SEQ ID NO: 2380

SEQ ID NO: 2563 - protein, 88 aa, Zika virus; identical to SEQ ID NO: 2381

SEQ ID NO: 2564 - protein, 75 aa, Zika virus; identical to SEQ ID NO: 2058

SEQ ID NO: 2565 - protein, 74 aa, Zika virus; identical to SEQ ID NO: 2057

SEQ ID NO: 2566 - protein, 93 aa, Zika virus; identical to SEQ ID NO: 2380

SEQ ID NO: 2567 - protein, 88 aa, Zika virus; identical to SEQ ID NO: 2381

SEQ ID NO: 2568 - protein, 75 aa, Zika virus; identical to SEQ ID NO: 2058

SEQ ID NO: 2569 - protein, 74 aa, Zika virus; identical to SEQ ID NO: 2057

SEQ ID NO: 2570 - protein, 93 aa, Zika virus; identical to SEQ ID NO: 2380

SEQ ID NO: 2571 - protein, 88 aa, Zika virus; identical to SEQ ID NO: 2381

SEQ ID NO: 2572 - protein, 75 aa, Zika virus; identical to SEQ ID NO: 2058

SEQ ID NO: 2573 - protein, 74 aa, Zika virus; identical to SEQ ID NO: 2057

SEQ ID NO: 2574 - protein, 93 aa, Zika virus; identical to SEQ ID NO: 2060

SEQ ID NO: 2575 - protein, 88 aa, Zika virus; identical to SEQ ID NO: 2303

SEQ ID NO: 2576 - protein, 75 aa, Zika virus; identical to SEQ ID NO: 2058

SEQ ID NO: 2577 - protein, 74 aa, Zika virus; identical to SEQ ID NO: 2057

SEQ ID NO: 2578 - protein, 93 aa, Zika virus; identical to SEQ ID NO: 2060

SEQ ID NO: 2579 - protein, 88 aa, Zika virus; identical to SEQ ID NO: 2303

SEQ ID NO: 2580 - protein, 75 aa, Zika virus; identical to SEQ ID NO: 2058

SEQ ID NO: 2581 - protein, 74 aa, Zika virus; identical to SEQ ID NO: 2057

SEQ ID NO: 2582 - protein, 93 aa, Zika virus; identical to SEQ ID NO: 2060

SEQ ID NO: 2583 - protein, 88 aa, Zika virus; identical to SEQ ID NO: 2303

SEQ ID NO: 2584 - protein, 75 aa, Zika virus; identical to SEQ ID NO: 2058

SEQ ID NO: 2585 - protein, 74 aa, Zika virus; identical to SEQ ID NO: 2057

SEQ ID NO: 2586 - protein, 93 aa, Zika virus; identical to SEQ ID NO: 2380

SEQ ID NO: 2587 - protein, 88 aa, Zika virus; identical to SEQ ID NO: 2381

SEQ ID NO: 2588 - protein, 75 aa, Zika virus; identical to SEQ ID NO: 2058

SEQ ID NO: 2589 - protein, 74 aa, Zika virus; identical to SEQ ID NO: 2057

SEQ ID NO: 2590 - protein, 93 aa, Zika virus; identical to SEQ ID NO: 2380

SEQ ID NO: 2591 - protein, 88 aa, Zika virus; identical to SEQ ID NO: 2381

SEQ ID NO: 2592 - protein, 75 aa, Zika virus; identical to SEQ ID NO: 2058

SEQ ID NO: 2593 - protein, 74 aa, Zika virus; identical to SEQ ID NO: 2057

SEQ ID NO: 2594 - protein, 93 aa, Zika virus; identical to SEQ ID NO: 2380

SEQ ID NO: 2595 - protein, 88 aa, Zika virus; identical to SEQ ID NO: 2381

SEQ ID NO: 2596 - protein, 75 aa, Zika virus; identical to SEQ ID NO: 2058

SEQ ID NO: 2597 - protein, 74 aa, Zika virus; identical to SEQ ID NO: 2057

SEQ ID NO: 2598 - protein, 93 aa, Zika virus; identical to SEQ ID NO: 2380

SEQ ID NO: 2599 - protein, 88 aa, Zika virus; identical to SEQ ID NO: 2381

SEQ ID NO: 2600 - protein, 75 aa, Zika virus; identical to SEQ ID NO: 2058

SEQ ID NO: 2601 - protein, 74 aa, Zika virus; identical to SEQ ID NO: 2057

SEQ ID NO: 2602 - protein, 93 aa, Zika virus; identical to SEQ ID NO: 2380

SEQ ID NO: 2603 - protein, 88 aa, Zika virus; identical to SEQ ID NO: 2381

SEQ ID NO: 2604 - protein, 75 aa, Zika virus; identical to SEQ ID NO: 2058

SEQ ID NO: 2605 - protein, 74 aa, Zika virus; identical to SEQ ID NO: 2057

SEQ ID NO: 2606 - protein, 93 aa, Zika virus; identical to SEQ ID NO: 2060

SEQ ID NO: 2607 - protein, 88 aa, Zika virus; identical to SEQ ID NO: 2303

SEQ ID NO: 2608 - protein, 75 aa, Zika virus; identical to SEQ ID NO: 2058

SEQ ID NO: 2609 - protein, 74 aa, Zika virus; identical to SEQ ID NO: 2057

SEQ ID NO: 2610 - protein, 93 aa, Zika virus; identical to SEQ ID NO: 2380

SEQ ID NO: 2611 - protein, 88 aa, Zika virus; identical to SEQ ID NO: 2381

SEQ ID NO: 2612 - protein, 75 aa, Zika virus; identical to SEQ ID NO: 2058

SEQ ID NO: 2613 - protein, 74 aa, Zika virus; identical to SEQ ID NO: 2057

SEQ ID NO: 2614 - protein, 93 aa, Zika virus; identical to SEQ ID NO: 2060

SEQ ID NO: 2615 - protein, 88 aa, Zika virus; identical to SEQ ID NO: 2303

SEQ ID NO: 2616 - protein, 75 aa, Zika virus; identical to SEQ ID NO: 2058

SEQ ID NO: 2617 - protein, 74 aa, Zika virus; identical to SEQ ID NO: 2057

SEQ ID NO: 2618 - protein, 93 aa, Zika virus; identical to SEQ ID NO: 2380

SEQ ID NO: 2619 - protein, 88 aa, Zika virus; identical to SEQ ID NO: 2381

SEQ ID NO: 2620 - protein, 75 aa, Zika virus; identical to SEQ ID NO: 2058

SEQ ID NO: 2621 - protein, 74 aa, Zika virus; identical to SEQ ID NO: 2057

SEQ ID NO: 2622 - protein, 93 aa, Zika virus; identical to SEQ ID NO: 2060

SEQ ID NO: 2623 - protein, 88 aa, Zika virus; identical to SEQ ID NO: 2303

SEQ ID NO: 2624 - protein, 75 aa, Zika virus; identical to SEQ ID NO: 2058

SEQ ID NO: 2625 - protein, 74 aa, Zika virus; identical to SEQ ID NO: 2057

SEQ ID NO: 2626 - protein, 93 aa, Zika virus; identical to SEQ ID NO: 2060

SEQ ID NO: 2627 - protein, 88 aa, Zika virus; identical to SEQ ID NO: 2303

SEQ ID NO: 2628 - protein, 75 aa, Zika virus; identical to SEQ ID NO: 2058

SEQ ID NO: 2629 - protein, 74 aa, Zika virus; identical to SEQ ID NO: 2057

SEQ ID NO: 2630 - protein, 93 aa, Zika virus; identical to SEQ ID NO: 2380

SEQ ID NO: 2631 - protein, 88 aa, Zika virus; identical to SEQ ID NO: 2381

SEQ ID NO: 2632 - protein, 75 aa, Zika virus; identical to SEQ ID NO: 2058

SEQ ID NO: 2633 - protein, 74 aa, Zika virus; identical to SEQ ID NO: 2057

SEQ ID NO: 2634 - protein, 93 aa, Zika virus; identical to SEQ ID NO: 2380

SEQ ID NO: 2635 - protein, 88 aa, Zika virus; identical to SEQ ID NO: 2381

SEQ ID NO: 2636 - protein, 75 aa, Zika virus; identical to SEQ ID NO: 2058

SEQ ID NO: 2637 - protein, 74 aa, Zika virus; identical to SEQ ID NO: 2057

SEQ ID NO: 2638 - protein, 93 aa, Zika virus; identical to SEQ ID NO: 2060

SEQ ID NO: 2639 - protein, 88 aa, Zika virus; identical to SEQ ID NO: 2303

SEQ ID NO: 2640 - protein, 75 aa, Zika virus; identical to SEQ ID NO: 2058

SEQ ID NO: 2641 - protein, 74 aa, Zika virus; identical to SEQ ID NO: 2057

SEQ ID NO: 2642 - protein, 93 aa, Zika virus; identical to SEQ ID NO: 2060

SEQ ID NO: 2643 - protein, 88 aa, Zika virus; identical to SEQ ID NO: 2303

SEQ ID NO: 2644 - protein, 75 aa, Zika virus; identical to SEQ ID NO: 2058

SEQ ID NO: 2645 - protein, 74 aa, Zika virus; identical to SEQ ID NO: 2057

SEQ ID NO: 2646 - protein, 93 aa, Zika virus; identical to SEQ ID NO: 2060

SEQ ID NO: 2647 - protein, 88 aa, Zika virus; identical to SEQ ID NO: 2303

SEQ ID NO: 2648 - protein, 75 aa, Zika virus; identical to SEQ ID NO: 2058

SEQ ID NO: 2649 - protein, 74 aa, Zika virus; identical to SEQ ID NO: 2057

SEQ ID NO: 2650 - protein, 93 aa, Zika virus; identical to SEQ ID NO: 2380

SEQ ID NO: 2651 - protein, 88 aa, Zika virus; identical to SEQ ID NO: 2381

SEQ ID NO: 2652 - protein, 75 aa, Zika virus; identical to SEQ ID NO: 2058

SEQ ID NO: 2653 - protein, 74 aa, Zika virus; identical to SEQ ID NO: 2057

SEQ ID NO: 2654 - protein, 93 aa, Zika virus; identical to SEQ ID NO: 2060

SEQ ID NO: 2655 - protein, 88 aa, Zika virus; identical to SEQ ID NO: 2303

SEQ ID NO: 2656 - protein, 75 aa, Zika virus; identical to SEQ ID NO: 2058

SEQ ID NO: 2657 - protein, 74 aa, Zika virus; identical to SEQ ID NO: 2057

SEQ ID NO: 2658 - protein, 93 aa, Zika virus; identical to SEQ ID NO: 2060

SEQ ID NO: 2659 - protein, 88 aa, Zika virus; identical to SEQ ID NO: 2303

SEQ ID NO: 2660 - protein, 75 aa, Zika virus; identical to SEQ ID NO: 2058

SEQ ID NO: 2661 - protein, 74 aa, Zika virus; identical to SEQ ID NO: 2057

SEQ ID NO: 2662 - protein, 93 aa, Zika virus; identical to SEQ ID NO: 2060

SEQ ID NO: 2663 - protein, 88 aa, Zika virus; identical to SEQ ID NO: 2303

SEQ ID NO: 2664 - protein, 75 aa, Zika virus; identical to SEQ ID NO: 2058

SEQ ID NO: 2665 - protein, 74 aa, Zika virus; identical to SEQ ID NO: 2057

SEQ ID NO: 2666 - protein, 93 aa, Zika virus; identical to SEQ ID NO: 2380

SEQ ID NO: 2667 - protein, 88 aa, Zika virus; identical to SEQ ID NO: 2381

SEQ ID NO: 2668 - protein, 75 aa, Zika virus
AVTLPFHSTRKLQTRSQTWLESREYTKHLIKVENWIFRNPGFALVAVAIAWLLGSSTSQKVIYLVMILLIAPAYS

SEQ ID NO: 2669 - protein, 74 aa, Zika virus
VTLPFHSTRKLQTRSQTWLESREYTKHLIKVENWIFRNPGFALVAVAIAWLLGSSTSQKVIYLVMILLIAPAYS

SEQ ID NO: 2670 - protein, 93 aa, Zika virus; identical to SEQ ID NO: 2060

SEQ ID NO: 2671 - protein, 88 aa, Zika virus; identical to SEQ ID NO: 2303

SEQ ID NO: 2672 - protein, 75 aa, Zika virus; identical to SEQ ID NO: 2058

SEQ ID NO: 2673 - protein, 74 aa, Zika virus; identical to SEQ ID NO: 2057

SEQ ID NO: 2674 - protein, 93 aa, Zika virus; identical to SEQ ID NO: 2380

SEQ ID NO: 2675 - protein, 88 aa, Zika virus; identical to SEQ ID NO: 2381

SEQ ID NO: 2676 - protein, 75 aa, Zika virus; identical to SEQ ID NO: 2058

SEQ ID NO: 2677 - protein, 74 aa, Zika virus; identical to SEQ ID NO: 2057

SEQ ID NO: 2678 - protein, 93 aa, Zika virus; identical to SEQ ID NO: 2060

SEQ ID NO: 2679 - protein, 88 aa, Zika virus; identical to SEQ ID NO: 2303

SEQ ID NO: 2680 - protein, 75 aa, Zika virus; identical to SEQ ID NO: 2058

SEQ ID NO: 2681 - protein, 74 aa, Zika virus; identical to SEQ ID NO: 2057

SEQ ID NO: 2682 - protein, 93 aa, Zika virus; identical to SEQ ID NO: 2380

SEQ ID NO: 2683 - protein, 88 aa, Zika virus; identical to SEQ ID NO: 2381

SEQ ID NO: 2684 - protein, 75 aa, Zika virus; identical to SEQ ID NO: 2058

SEQ ID NO: 2685 - protein, 74 aa, Zika virus; identical to SEQ ID NO: 2057

SEQ ID NO: 2686 - protein, 93 aa, Zika virus; identical to SEQ ID NO: 2060

SEQ ID NO: 2687 - protein, 88 aa, Zika virus; identical to SEQ ID NO: 2303

SEQ ID NO: 2688 - protein, 75 aa, Zika virus; identical to SEQ ID NO: 2058

SEQ ID NO: 2689 - protein, 74 aa, Zika virus; identical to SEQ ID NO: 2057

SEQ ID NO: 2690 - protein, 88 aa, Zika virus; identical to SEQ ID NO: 2308

SEQ ID NO: 2691 - protein, 74 aa, Zika virus; identical to SEQ ID NO: 2048

SEQ ID NO: 2692 - protein, 88 aa, Zika virus; identical to SEQ ID NO: 2047

SEQ ID NO: 2693 - protein, 74 aa, Zika virus
VTLPSHSTRKLQTRSQTWLESREYTKHLIRVENWIFRNPGLALAAAAIAWLLGSSTSQKVIYLVMILLIAPAYS

SEQ ID NO: 2694 - protein, 88 aa, Zika virus
RRGSAYYMYLDRNDAGKAISFPTTLGMNKCYIQIMDLGHMCDATMSYECPMLDEGVEPDDVDCWCNTTSTWVVYGTCHHKKGEARRSR

SEQ ID NO: 2695 - protein, 74 aa, Zika virus; identical to SEQ ID NO: 2048

SEQ ID NO: 2696 - protein, 88 aa, Zika virus; identical to SEQ ID NO: 2694

SEQ ID NO: 2697 - protein, 74 aa, Zika virus; identical to SEQ ID NO: 2048

SEQ ID NO: 2698 - protein, 77 aa, Zika virus; identical to SEQ ID NO: 2065

SEQ ID NO: 2699 - protein, 77 aa, Zika virus; identical to SEQ ID NO: 2065

SEQ ID NO: 2700 - protein, 88 aa, Zika virus; identical to SEQ ID NO: 2308

SEQ ID NO: 2701 - protein, 74 aa, Zika virus; identical to SEQ ID NO: 2048

SEQ ID NO: 2702 - protein, 77 aa, Zika virus; identical to SEQ ID NO: 2065

SEQ ID NO: 2703 - protein, 77 aa, Zika virus; identical to SEQ ID NO: 2065

SEQ ID NO: 2704 - protein, 77 aa, Zika virus; identical to SEQ ID NO: 2065

SEQ ID NO: 2705 - protein, 77 aa, Zika virus; identical to SEQ ID NO: 2065

SEQ ID NO: 2706 - protein, 77 aa, Zika virus; identical to SEQ ID NO: 2065

SEQ ID NO: 2707 - protein, 77 aa, Zika virus; identical to SEQ ID NO: 2065

SEQ ID NO: 2708 - protein, 77 aa, Zika virus; identical to SEQ ID NO: 2065

SEQ ID NO: 2709 - protein, 77 aa, Zika virus; identical to SEQ ID NO: 2065

SEQ ID NO: 2710 - protein, 88 aa, Zika virus; identical to SEQ ID NO: 2047

SEQ ID NO: 2711 - protein, 74 aa, Zika virus; identical to SEQ ID NO: 2048

SEQ ID NO: 2712 - protein, 93 aa, Zika virus; identical to SEQ ID NO: 2060

SEQ ID NO: 2713 - protein, 88 aa, Zika virus; identical to SEQ ID NO: 2303

SEQ ID NO: 2714 - protein, 75 aa, Zika virus; identical to SEQ ID NO: 2058

SEQ ID NO: 2715 - protein, 74 aa, Zika virus; identical to SEQ ID NO: 2057

SEQ ID NO: 2716 - protein, 87 aa, Zika virus
RGSAYHMYLDRSDAGEAISFPTTLGMNKCYIQIMDLGHMCDATMSYECPMLDEGVEPDDVDCWCNTTSTWVVYGTCHHKKGEARRSR

SEQ ID NO: 2717 - protein, 74 aa, Zika virus; identical to SEQ ID NO: 2048

SEQ ID NO: 2718 - protein, 88 aa, Zika virus; identical to SEQ ID NO: 2308

SEQ ID NO: 2719 - protein, 74 aa, Zika virus; identical to SEQ ID NO: 2048

SEQ ID NO: 2720 - protein, 88 aa, Zika virus; identical to SEQ ID NO: 2308

SEQ ID NO: 2721 - protein, 74 aa, Zika virus; identical to SEQ ID NO: 2048

SEQ ID NO: 2722 - protein, 93 aa, Zika virus; identical to SEQ ID NO: 2051

SEQ ID NO: 2723 - protein, 77 aa, Zika virus; identical to SEQ ID NO: 2065

SEQ ID NO: 2724 - protein, 75 aa, Zika virus; identical to SEQ ID NO: 2049

SEQ ID NO: 2725 - protein, 93 aa, Zika virus; identical to SEQ ID NO: 2051

SEQ ID NO: 2726 - protein, 77 aa, Zika virus; identical to SEQ ID NO: 2065

SEQ ID NO: 2727 - protein, 75 aa, Zika virus; identical to SEQ ID NO: 2049

SEQ ID NO: 2728 - protein, 93 aa, Zika virus; identical to SEQ ID NO: 2051

SEQ ID NO: 2729 - protein, 88 aa, Zika virus; identical to SEQ ID NO: 2047

SEQ ID NO: 2730 - protein, 75 aa, Zika virus; identical to SEQ ID NO: 2049

SEQ ID NO: 2731 - protein, 74 aa, Zika virus; identical to SEQ ID NO: 2048

SEQ ID NO: 2732 - protein, 93 aa, Zika virus; identical to SEQ ID NO: 2051

SEQ ID NO: 2733 - protein, 77 aa, Zika virus; identical to SEQ ID NO: 2065

SEQ ID NO: 2734 - protein, 75 aa, Zika virus; identical to SEQ ID NO: 2049

SEQ ID NO: 2735 - protein, 93 aa, Zika virus; identical to SEQ ID NO: 2051

SEQ ID NO: 2736 - protein, 77 aa, Zika virus; identical to SEQ ID NO: 2065

SEQ ID NO: 2737 - protein, 75 aa, Zika virus; identical to SEQ ID NO: 2049

SEQ ID NO: 2738 - protein, 93 aa, Zika virus; identical to SEQ ID NO: 2051

SEQ ID NO: 2739 - protein, 88 aa, Zika virus; identical to SEQ ID NO: 2047

SEQ ID NO: 2740 - protein, 75 aa, Zika virus; identical to SEQ ID NO: 2049

SEQ ID NO: 2741 - protein, 74 aa, Zika virus; identical to SEQ ID NO: 2048

SEQ ID NO: 2742 - protein, 93 aa, Zika virus; identical to SEQ ID NO: 2051

SEQ ID NO: 2743 - protein, 88 aa, Zika virus; identical to SEQ ID NO: 2047

SEQ ID NO: 2744 - protein, 75 aa, Zika virus; identical to SEQ ID NO: 2049

SEQ ID NO: 2745 - protein, 74 aa, Zika virus; identical to SEQ ID NO: 2048

SEQ ID NO: 2746 - protein, 93 aa, Zika virus; identical to SEQ ID NO: 2051

SEQ ID NO: 2747 - protein, 77 aa, Zika virus; identical to SEQ ID NO: 2065

SEQ ID NO: 2748 - protein, 75 aa, Zika virus; identical to SEQ ID NO: 2049

SEQ ID NO: 2749 - protein, 93 aa, Zika virus; identical to SEQ ID NO: 2051

SEQ ID NO: 2750 - protein, 88 aa, Zika virus; identical to SEQ ID NO: 2047

SEQ ID NO: 2751 - protein, 75 aa, Zika virus; identical to SEQ ID NO: 2049

SEQ ID NO: 2752 - protein, 74 aa, Zika virus; identical to SEQ ID NO: 2048

SEQ ID NO: 2753 - protein, 93 aa, Zika virus; identical to SEQ ID NO: 2051

SEQ ID NO: 2754 - protein, 77 aa, Zika virus; identical to SEQ ID NO: 2065

SEQ ID NO: 2755 - protein, 75 aa, Zika virus; identical to SEQ ID NO: 2049

SEQ ID NO: 2756 - protein, 88 aa, Zika virus; identical to SEQ ID NO: 2047

SEQ ID NO: 2757 - protein, 74 aa, Zika virus; identical to SEQ ID NO: 2048

SEQ ID NO: 2758 - protein, 88 aa, Zika virus; identical to SEQ ID NO: 2047

SEQ ID NO: 2759 - protein, 74 aa, Zika virus
VTLPSHSTRKLQTRSQTWLESREYTKHLIRVENWIFRNPGXALAAAAIAWLLGSSTSQKVIYLVMILLIAPAYS

SEQ ID NO: 2760 - protein, 88 aa, Zika virus
RRGSAYYMYLDRSDAGEAISFPTTLGMNKCHIQIMDLGHMCDATMSYECPMLDEGVEPDDVDCWCNTTSTWVVYGTCHHKKGEARRSR

SEQ ID NO: 2761 - protein, 74 aa, Zika virus
VTLPSHSTRKLQTRSQTWLESREYTKHLIRVENWIFRNPGFALAAAAIAWLFGSSTSQKVIYLVMILLIAPAYS

SEQ ID NO: 2762 - protein, 93 aa, Zika virus; identical to SEQ ID NO: 2051

SEQ ID NO: 2763 - protein, 88 aa, Zika virus; identical to SEQ ID NO: 2047

SEQ ID NO: 2764 - protein, 75 aa, Zika virus; identical to SEQ ID NO: 2049

SEQ ID NO: 2765 - protein, 74 aa, Zika virus; identical to SEQ ID NO: 2048

SEQ ID NO: 2766 - protein, 93 aa, Zika virus; identical to SEQ ID NO: 2051

SEQ ID NO: 2767 - protein, 88 aa, Zika virus; identical to SEQ ID NO: 2047

SEQ ID NO: 2768 - protein, 75 aa, Zika virus; identical to SEQ ID NO: 2049

SEQ ID NO: 2769 - protein, 74 aa, Zika virus; identical to SEQ ID NO: 2048

SEQ ID NO: 2770 - protein, 88 aa, Zika virus; identical to SEQ ID NO: 2047

SEQ ID NO: 2771 - protein, 74 aa, Zika virus; identical to SEQ ID NO: 2048

SEQ ID NO: 2772 - protein, 88 aa, Zika virus; identical to SEQ ID NO: 2047

SEQ ID NO: 2773 - protein, 74 aa, Zika virus; identical to SEQ ID NO: 2048

SEQ ID NO: 2774 - protein, 88 aa, Zika virus; identical to SEQ ID NO: 2047

SEQ ID NO: 2775 - protein, 74 aa, Zika virus; identical to SEQ ID NO: 2048

SEQ ID NO: 2776 - protein, 168 aa, Zika virus; identical to SEQ ID NO: 4

SEQ ID NO: 2777 - protein, 88 aa, Zika virus; identical to SEQ ID NO: 2047

SEQ ID NO: 2778 - protein, 74 aa, Zika virus; identical to SEQ ID NO: 2048

SEQ ID NO: 2779 - protein, 77 aa, Zika virus; identical to SEQ ID NO: 2065

SEQ ID NO: 2780 - protein, 88 aa, Zika virus; identical to SEQ ID NO: 2047

SEQ ID NO: 2781 - protein, 74 aa, Zika virus; identical to SEQ ID NO: 2048

SEQ ID NO: 2782 - protein, 77 aa, Zika virus; identical to SEQ ID NO: 2065

SEQ ID NO: 2783 - protein, 77 aa, Zika virus; identical to SEQ ID NO: 2065

SEQ ID NO: 2784 - protein, 77 aa, Zika virus; identical to SEQ ID NO: 2065

SEQ ID NO: 2785 - protein, 77 aa, Zika virus; identical to SEQ ID NO: 2065

SEQ ID NO: 2786 - protein, 88 aa, Zika virus; identical to SEQ ID NO: 2303

SEQ ID NO: 2787 - protein, 74 aa, Zika virus; identical to SEQ ID NO: 2057

SEQ ID NO: 2788 - protein, 88 aa, Zika virus; identical to SEQ ID NO: 2047

SEQ ID NO: 2789 - protein, 74 aa, Zika virus; identical to SEQ ID NO: 2048

SEQ ID NO: 2790 - protein, 88 aa, Zika virus; identical to SEQ ID NO: 2047

SEQ ID NO: 2791 - protein, 74 aa, Zika virus; identical to SEQ ID NO: 2048

SEQ ID NO: 2792 - protein, 93 aa, Zika virus; identical to SEQ ID NO: 2083

SEQ ID NO: 2793 - protein, 75 aa, Zika virus; identical to SEQ ID NO: 2049

SEQ ID NO: 2794 - protein, 93 aa, Zika virus
VEVTRRGSAYYMYLDRSDAGKAISFPTTLGVNKCYIQIMDLGHMCDATMSYECPMLDEGVEPDDVDCWCNTTSTWVVYGTCHHKKGEARRSRR

SEQ ID NO: 2795 - protein, 75 aa, Zika virus; identical to SEQ ID NO: 2049

SEQ ID NO: 2796 - protein, 93 aa, Zika virus; identical to SEQ ID NO: 2051

SEQ ID NO: 2797 - protein, 75 aa, Zika virus; identical to SEQ ID NO: 2049

SEQ ID NO: 2798 - protein, 77 aa, Zika virus; identical to SEQ ID NO: 2065

SEQ ID NO: 2799 - protein, 93 aa, Zika virus; identical to SEQ ID NO: 2060

SEQ ID NO: 2800 - protein, 77 aa, Zika virus; identical to SEQ ID NO: 2061

SEQ ID NO: 2801 - protein, 75 aa, Zika virus; identical to SEQ ID NO: 2058

SEQ ID NO: 2802 - protein, 93 aa, Zika virus
VEVTRRGSAYYMYLDRSDAGEAISFPTTLGVNKCYIQIMDLGHMCDATMSYECPMLDEGVEPDDVDCWCNTTSTWVVYGTCHHKKGEARRSRR

SEQ ID NO: 2803 - protein, 75 aa, Zika virus; identical to SEQ ID NO: 2049

SEQ ID NO: 2804 - protein, 93 aa, Zika virus; identical to SEQ ID NO: 2051

SEQ ID NO: 2805 - protein, 88 aa, Zika virus; identical to SEQ ID NO: 2047

SEQ ID NO: 2806 - protein, 75 aa, Zika virus; identical to SEQ ID NO: 2049

SEQ ID NO: 2807 - protein, 93 aa, Zika virus; identical to SEQ ID NO: 2060

SEQ ID NO: 2808 - protein, 87 aa, Zika virus; identical to SEQ ID NO: 2056

SEQ ID NO: 2809 - protein, 75 aa, Zika virus; identical to SEQ ID NO: 2058

SEQ ID NO: 2810 - protein, 74 aa, Zika virus; identical to SEQ ID NO: 2057

SEQ ID NO: 2811 - protein, 88 aa, Zika virus; identical to SEQ ID NO: 2047

SEQ ID NO: 2812 - protein, 74 aa, Zika virus; identical to SEQ ID NO: 2693

SEQ ID NO: 2813 - protein, 93 aa, Zika virus; identical to SEQ ID NO: 2153

SEQ ID NO: 2814 - protein, 75 aa, Zika virus; identical to SEQ ID NO: 2049

SEQ ID NO: 2815 - protein, 93 aa, Zika virus; identical to SEQ ID NO: 2051

SEQ ID NO: 2816 - protein, 75 aa, Zika virus; identical to SEQ ID NO: 2049

SEQ ID NO: 2817 - protein, 88 aa, Zika virus; identical to SEQ ID NO: 2047

SEQ ID NO: 2818 - protein, 74 aa, Zika virus; identical to SEQ ID NO: 2048

SEQ ID NO: 2819 - protein, 77 aa, Zika virus; identical to SEQ ID NO: 2065

SEQ ID NO: 2820 - protein, 77 aa, Zika virus; identical to SEQ ID NO: 2065

SEQ ID NO: 2821 - protein, 88 aa, Zika virus; identical to SEQ ID NO: 2047

SEQ ID NO: 2822 - protein, 74 aa, Zika virus; identical to SEQ ID NO: 2048

SEQ ID NO: 2823 - protein, 93 aa, Zika virus; identical to SEQ ID NO: 2060

SEQ ID NO: 2824 - protein, 75 aa, Zika virus; identical to SEQ ID NO: 2058

SEQ ID NO: 2825 - protein, 93 aa, Zika virus; identical to SEQ ID NO: 2051

SEQ ID NO: 2826 - protein, 88 aa, Zika virus; identical to SEQ ID NO: 2047

SEQ ID NO: 2827 - protein, 75 aa, Zika virus; identical to SEQ ID NO: 2049

SEQ ID NO: 2828 - protein, 74 aa, Zika virus; identical to SEQ ID NO: 2048

SEQ ID NO: 2829 - protein, 93 aa, Zika virus; identical to SEQ ID NO: 2051

SEQ ID NO: 2830 - protein, 88 aa, Zika virus; identical to SEQ ID NO: 2047

SEQ ID NO: 2831 - protein, 75 aa, Zika virus; identical to SEQ ID NO: 2049

SEQ ID NO: 2832 - protein, 74 aa, Zika virus; identical to SEQ ID NO: 2048

SEQ ID NO: 2833 - protein, 93 aa, Zika virus; identical to SEQ ID NO: 2051

SEQ ID NO: 2834 - protein, 77 aa, Zika virus; identical to SEQ ID NO: 2065

SEQ ID NO: 2835 - protein, 75 aa, Zika virus; identical to SEQ ID NO: 2049

SEQ ID NO: 2836 - protein, 93 aa, Zika virus; identical to SEQ ID NO: 2051

SEQ ID NO: 2837 - protein, 75 aa, Zika virus; identical to SEQ ID NO: 2049

SEQ ID NO: 2838 - protein, 88 aa, Zika virus; identical to SEQ ID NO: 2047

SEQ ID NO: 2839 - protein, 74 aa, Zika virus; identical to SEQ ID NO: 2048

SEQ ID NO: 2840 - protein, 87 aa, Zika virus
RGSAYYMYLDRNDAGEAISFPTTLGMNKCYIQIMDLGHMCDATMSYECPMLDEGVEPDDVDCWCNTTSTWVVYGTCHHKKGEARRSR

SEQ ID NO: 2841 - protein, 74 aa, Zika virus; identical to SEQ ID NO: 2048

SEQ ID NO: 2842 - protein, 77 aa, Zika virus; identical to SEQ ID NO: 2061

SEQ ID NO: 2843 - protein, 87 aa, Zika virus; identical to SEQ ID NO: 2056

SEQ ID NO: 2844 - protein, 74 aa, Zika virus; identical to SEQ ID NO: 2057

SEQ ID NO: 2845 - protein, 77 aa, Zika virus; identical to SEQ ID NO: 2353

SEQ ID NO: 2846 - protein, 87 aa, Zika virus; identical to SEQ ID NO: 2056

SEQ ID NO: 2847 - protein, 74 aa, Zika virus; identical to SEQ ID NO: 2057

SEQ ID NO: 2848 - protein, 87 aa, Zika virus; identical to SEQ ID NO: 2056

SEQ ID NO: 2849 - protein, 74 aa, Zika virus; identical to SEQ ID NO: 2057

SEQ ID NO: 2850 - protein, 87 aa, Zika virus; identical to SEQ ID NO: 2840

SEQ ID NO: 2851 - protein, 74 aa, Zika virus
VTLPSHSTRKLQTRSQTWLESREYTKHLIRVENWILRNPGFALAAAAIAWLLGSSTSQKVIYLVMILLIAPAYS

SEQ ID NO: 2852 - protein, 168 aa, Zika virus; identical to SEQ ID NO: 4

SEQ ID NO: 2853 - protein, 93 aa, Zika virus; identical to SEQ ID NO: 2051

SEQ ID NO: 2854 - protein, 87 aa, Zika virus; identical to SEQ ID NO: 2840

SEQ ID NO: 2855 - protein, 75 aa, Zika virus; identical to SEQ ID NO: 2049

SEQ ID NO: 2856 - protein, 74 aa, Zika virus; identical to SEQ ID NO: 2048

SEQ ID NO: 2857 - protein, 168 aa, Zika virus; identical to SEQ ID NO: 4

SEQ ID NO: 2858 - protein, 93 aa, Zika virus; identical to SEQ ID NO: 2051

SEQ ID NO: 2859 - protein, 87 aa, Zika virus; identical to SEQ ID NO: 2840

SEQ ID NO: 2860 - protein, 75 aa, Zika virus; identical to SEQ ID NO: 2049

SEQ ID NO: 2861 - protein, 74 aa, Zika virus; identical to SEQ ID NO: 2048

SEQ ID NO: 2862 - protein, 93 aa, Zika virus; identical to SEQ ID NO: 2051

SEQ ID NO: 2863 - protein, 87 aa, Zika virus; identical to SEQ ID NO: 2840

SEQ ID NO: 2864 - protein, 75 aa, Zika virus
AVTLPSHSTRKLQTRSQTWLESREYTKHLIRVENWIFRNPGFALAAAAIAWLLGSSTSQKVIYLVMILLIALAYS

SEQ ID NO: 2865 - protein, 74 aa, Zika virus
VTLPSHSTRKLQTRSQTWLESREYTKHLIRVENWIFRNPGFALAAAAIAWLLGSSTSQKVIYLVMILLIALAYS

SEQ ID NO: 2866 - protein, 93 aa, Zika virus; identical to SEQ ID NO: 2051

SEQ ID NO: 2867 - protein, 87 aa, Zika virus; identical to SEQ ID NO: 2840

SEQ ID NO: 2868 - protein, 75 aa, Zika virus; identical to SEQ ID NO: 2049

SEQ ID NO: 2869 - protein, 74 aa, Zika virus; identical to SEQ ID NO: 2048

SEQ ID NO: 2870 - protein, 87 aa, Zika virus; identical to SEQ ID NO: 2840

SEQ ID NO: 2871 - protein, 74 aa, Zika virus; identical to SEQ ID NO: 2048

SEQ ID NO: 2872 - protein, 77 aa, Zika virus; identical to SEQ ID NO: 2065

SEQ ID NO: 2873 - protein, 88 aa, Zika virus; identical to SEQ ID NO: 2047

SEQ ID NO: 2874 - protein, 74 aa, Zika virus; identical to SEQ ID NO: 2048

SEQ ID NO: 2875 - protein, 87 aa, Zika virus; identical to SEQ ID NO: 2840

SEQ ID NO: 2876 - protein, 74 aa, Zika virus; identical to SEQ ID NO: 2048

SEQ ID NO: 2877 - protein, 87 aa, Zika virus; identical to SEQ ID NO: 2840

SEQ ID NO: 2878 - protein, 74 aa, Zika virus; identical to SEQ ID NO: 2048

SEQ ID NO: 2879 - protein, 77 aa, Zika virus; identical to SEQ ID NO: 2065

SEQ ID NO: 2880 - protein, 88 aa, Zika virus; identical to SEQ ID NO: 2047

SEQ ID NO: 2881 - protein, 74 aa, Zika virus; identical to SEQ ID NO: 2048

SEQ ID NO: 2882 - protein, 88 aa, Zika virus; identical to SEQ ID NO: 2308

SEQ ID NO: 2883 - protein, 74 aa, Zika virus; identical to SEQ ID NO: 2048

SEQ ID NO: 2884 - protein, 87 aa, Zika virus
RGSAYYMYLDRSDAGEAISFPTTLGMNKCYIQIMDLGHMCDATMSYECPMLDEGVEPDDVDCWCNTTSTWVVYGTCHHKKGEARRSR

SEQ ID NO: 2885 - protein, 74 aa, Zika virus
VTLPSHSTRKLQTRSQTWLESREYTKHLIRVENWIFRNPGFALAAAVIAWLLGSSTSQKVIYLVMILLIAPAYS

SEQ ID NO: 2886 - protein, 87 aa, Zika virus; identical to SEQ ID NO: 2840

SEQ ID NO: 2887 - protein, 74 aa, Zika virus; identical to SEQ ID NO: 2048

SEQ ID NO: 2888 - protein, 87 aa, Zika virus; identical to SEQ ID NO: 2840

SEQ ID NO: 2889 - protein, 74 aa, Zika virus; identical to SEQ ID NO: 2048

SEQ ID NO: 2890 - protein, 88 aa, Zika virus; identical to SEQ ID NO: 2047

SEQ ID NO: 2891 - protein, 74 aa, Zika virus; identical to SEQ ID NO: 2048

SEQ ID NO: 2892 - protein, 87 aa, Zika virus; identical to SEQ ID NO: 2056

SEQ ID NO: 2893 - protein, 74 aa, Zika virus; identical to SEQ ID NO: 2057

SEQ ID NO: 2894 - protein, 77 aa, Zika virus; identical to SEQ ID NO: 2065

SEQ ID NO: 2895 - protein, 77 aa, Zika virus; identical to SEQ ID NO: 2061

SEQ ID NO: 2896 - DNA, 380 bp, synthetic construct
  source 1..380: mol_type = other DNA
gacattgattattgactagttattaatagtaatcaattacggggtcattagttcatagcccatatatggagttccgcgttacataacttacggtaaatggcccgcctggctgaccgcccaacgacccccgcccattgacgtcaataatgacgtatgttcccatagtaacgccaatagggactttccattgacgtcaatgggtggactatttacggtaaactgcccacttggcagtacatcaagtgtatcatatgccaagtacgccccctattgacgtcaatgacggtaaatggcccgcctggcattatgcccagtacatgaccttatgggactttcctacttggcagtacatctacgtattagtcatcgctattaccatg

SEQ ID NO: 2897 - DNA, 204 bp, synthetic construct
  source 1..204: mol_type = other DNA
gtgatgcggttttggcagtacatcaatgggcgtggatagcggtttgactcacggggatttccaagtctccaccccattgacgtcaatgggagtttgttttggcaccaaaatcaacgggactttccaaaatgtcgtaacaactccgccccattgacgcaaatgggcggtaggcgtgtacggtgggaggtctatataagcagagct

SEQ ID NO: 2898 - DNA, 19 bp, synthetic construct
  source 1..19: mol_type = other DNA
taatacgactcactatagg

SEQ ID NO: 2899 - DNA, 49 bp, synthetic construct
  source 1..49: mol_type = other DNA
gttaacacaactctgatgagtccgtgaggacgaaacgagtaagctcgtc

SEQ ID NO: 2900 - DNA, 106 bp, synthetic construct
  source 1..106: mol_type = other DNA
agttgttactgttgctgactcagactgcgacagttcgagtttgaagcgaaagctagcaacagtatcaacaggttttatttggatttggaaacgagagtttctggtc

SEQ ID NO: 2901 - DNA, 90 bp, synthetic construct
  source 1..90: mol_type = other DNA
atgaaaaacccaaaaaagaaatccggaggattccggattgtcaatatgctaaaacgcggagtagcccgtgtgagcccctttgggggcttg

SEQ ID NO: 2902 - DNA, 717 bp, synthetic construct
  source 1..717: mol_type = other DNA
atggtgagcaagggcgaggagctgttcaccggggtggtgcccatcctggtcgagctggacggcgacgtaaacggccacaagttcagcgtgtccggcgagggcgagggcgatgccacctacggcaagctgaccctgaagttcatctgcaccaccggcaagctgcccgtgccctggcccaccctcgtgaccaccctgacctacggcgtgcagtgcttcagccgctaccccgaccacatgaagcagcacgacttcttcaagtccgccatgcccgaaggctacgtccaggagcgcaccatcttcttcaaggacgacggcaactacaagacccgcgccgaggtgaagttcgagggcgacaccctggtgaaccgcatcgagctgaagggcatcgacttcaaggaggacggcaacatcctggggcacaagctggagtacaactacaacagccacaacgtctatatcatggccgacaagcagaagaacggcatcaaggtgaacttcaagatccgccacaacatcgaggacggcagcgtgcagctcgccgaccactaccagcagaacacccccatcggcgacggccccgtgctgctgcccgacaaccactacctgagcacccagtccgccctgagcaaagaccccaacgagaagcgcgatcacatggtcctgctggagttcgtgaccgccgccgggatcactctcggcatggacgagctgtacaag

SEQ ID NO: 2903 - DNA, 510 bp, synthetic construct
  source 1..510: mol_type = other DNA
gtcttcacactcgaagatttcgttggggactggcgacagacagccggctacaacctggaccaagtccttgaacagggaggtgtgtccagtttgtttcagaatctcggggtgtccgtaactccgatccaaaggattgtcctgagcggtgaaaatgggctgaagatcgacatccatgtcatcatcccgtatgaaggtctgagcggcgaccaaatgggccagatcgaaaaaatttttaaggtggtgtaccctgtggatgatcatcactttaaggtgatcctgcactatggcacactggtaatcgacggggttacgccgaacatgatcgactatttcggacggccgtatgaaggcatcgccgtgttcgacggcaaaaagatcactgtaacagggaccctgtggaacggcaacaaaattatcgacgagcgcctgatcaaccccgacggctccctgctgttccgagtaaccatcaacggagtgaccggctggcggctgtgcgaacgcattctggcg

SEQ ID NO: 2904 - DNA, 18 bp, synthetic construct
  source 1..18: mol_type = other DNA
catcatcaccatcaccac

SEQ ID NO: 2905 - DNA, 386 bp, synthetic construct
  source 1..386: mol_type = other DNA
gcaccaatcttaatgttgtcaggcctgctagtcagccacagcttggggaaagctgtgcagcctgtgacccccccaggagaagctgggaaaccaagcctatagtcaggccgagaacgccatggcacggaagaagccatgctgcctgtgagcccctcagaggacactgagtcaaaaaaccccacgcgcttggaggcgcaggatgggaaaagaaggtggcgaccttccccacccttcaatctggggcctgaactggagatcagctgtggatctccagaagagggactagtggttagaggagaccccccggaaaacgcaaaacagcatattgacgctgggaaagaccagagactccatgagtttccaccacgctggccgccaggcacaga

SEQ ID NO: 2906 - DNA, 110 bp, synthetic construct
  source 1..110: mol_type = other DNA
tcgccgaatagcggcggccggtgtggggaaatccatgggtctggccggcatggtcccagcctcctcgctggcgccggctgggcaacatgcttcggcatggcgaatgggac

SEQ ID NO: 2907 - DNA, 225 bp, synthetic construct
  source 1..225: mol_type = other DNA
ctgtgccttctagttgccagccatctgttgtttgcccctcccccgtgccttccttgaccctggaaggtgccactcccactgtcctttcctaataaaatgaggaaattgcatcgcattgtctgagtaggtgtcattctattctggggggtggggtggggcaggacagcaagggggaggattgggaagacaatagcaggcatgctggggatgcggtgggctctatgg

SEQ ID NO: 2908 - DNA, 15 bp, synthetic construct
  source 1..15: mol_type = other DNA
atgaaaaacccaaaa

SEQ ID NO: 2909 - DNA, 30 bp, synthetic construct
  source 1..30: mol_type = other DNA
atgaaaaacccaaaaaagaaatccggagga

SEQ ID NO: 2910 - DNA, 45 bp, synthetic construct
  source 1..45: mol_type = other DNA
atgaaaaacccaaaaaagaaatccggaggattccggattgtcaat

SEQ ID NO: 2911 - DNA, 60 bp, synthetic construct
  source 1..60: mol_type = other DNA
atgaaaaacccaaaaaagaaatccggaggattccggattgtcaatatgctaaaacgcgga

SEQ ID NO: 2912 - DNA, 75 bp, synthetic construct
  source 1..75: mol_type = other DNA
atgaaaaacccaaaaaagaaatccggaggattccggattgtcaatatgctaaaacgcggagtagcccgtgtgagc

SEQ ID NO: 2913 - protein, 5 aa, synthetic construct
MKNPK

SEQ ID NO: 2914 - protein, 10 aa, synthetic construct
MKNPKKKSGG

SEQ ID NO: 2915 - protein, 15 aa, synthetic construct
MKNPKKKSGGFRIVN

SEQ ID NO: 2916 - protein, 20 aa, synthetic construct
MKNPKKKSGGFRIVNMLKRG

SEQ ID NO: 2917 - protein, 25 aa, synthetic construct
MKNPKKKSGGFRIVNMLKRGVARVS
